United States Patent Application Publication US 2022/0031776 A1 - sequence listing, part 11

SEQ ID NO: 286 - DNA, 5036250 bp, Klebsiella pneumoniae (residues 3,357,501-5,036,250 of 5,036,250)
  modified_base (1574679)..(1574680): a, c, t, g, unknown or other
  modified_base (2310703)..(2310706): a, c, t, g, unknown or other
  modified_base (2442940)..(2442990): a, c, t, g, unknown or other
  modified_base (2446776)..(2446851): a, c, t, g, unknown or other
  modified_base (2536439)..(2536458): a, c, t, g, unknown or other
  modified_base (2536910)..(2536911): a, c, t, g, unknown or other
  modified_base (3046635)..(3046636): a, c, t, g, unknown or other
  modified_base (3047105)..(3047200): a, c, t, g, unknown or other
  modified_base (3047482)..(3047497): a, c, t, g, unknown or other
  modified_base (3805884)..(3805906): a, c, t, g, unknown or other
atttggcgctgatccatttatcggcgacgatcccgagcagcgtaggcatcagaacggcggcgataccgagagagctatacaccgcgccgattgccgcgccgtcaaacttcagggtaacaaacatgtacgagccgagcgtggtcagccagctcccccaaaggcagaactgcaggaacgacagtatttttaactgcagcttaagattcatgtatttatcctcacgaatgtgggctggttatgttttttaaataacataaccaccgttattttgatgcgattctatcattcaccggttgaaggcttctgttaactgccgcagaaaatcgaaagatattacgaagtatgtcgtaaaaaagagaggcccggtgcgatgcccgggcctgggtgaaagaagcgttatttacggcgatagcttttctgcgcggtattcactttatacagataccggcgcgattctgccgacggatggcgggtggtgagcgtctggtagacgtcacctggcgccatgctgttaatgatgttcgccgcctggactttatcgctggagaagacgcgcagtacgctgccggcgccgccgttataggcggtaattaccgcgtagcgacgcgaggtggggttatcgatgccggcgagataaacattgttcagcatcgccagataagcggtgccggtatcgatgttattcgccgggtcaaacagatagctgcggctcggcaggccggatttgccctgcgaacggaagacgtctttacccgcgctatgctgtacgacctgcatcagccccatggcatccgcgtggcttaccgcataggggttaaacgacgactctgtttgcataatcgcaaggatcagcgactcatctacgccatatttacgcgaggcctggcgcaccatgccgagatatttatgcgcacgtttatcgaggtggttaggcaccaggttgatggtgatgctatagaccacgcgcagtccattgctgcggctcttcaggcgggtttgcagcagataatcggcatagcgcgcggcgcgccactcccagcggatggattcgccagtgttatcaaccacctggccgtagaggaacggctctttggaaatctgaatatcatcgacgtcggaatagagatcgatagagttggggtcatcgcccatcaacagggttttgataatcgcctggcgtaaccgtccttgcggatcggttccggcgatggtctcgacggtaatcgtaccggcatcaaagttgatgtggctgcgggtttgatattgatcggtatattttacgtagtccttcggcccggcgagcagaacttcgttatacccccaaatgttctcgatgttatgggcaaactggcccatcaggatatcgaatccgttagtgtccttgacccaggcctcgttatattcggcgccttttttattggaactggaacaggacacgagcaatggcgcaatcagcgcgagcgctaagtattttttcatcattccgggagtgcgtgttgtgtttgtttggtaaaggccgtgaggcccttactgtttttccggcggcgtgtagccttcgatgtgaacgtctttcccttcaaacaggaactgcaccatctcctgttccagcagcttgcggtgctccgggttcatcatgctgagttttttctcgttgatcagcatagtctgcttatgctgccactgcgcccaagcttctttggagatttcgttgtaaatgcgcttaccgagctcgcccggatagagctggaaatcctggccgtccgcctcacgctgcaagaaagtacaaaaaatcgttctgctcataatcaatcctcttttatagccgaaaaaactagaccggcgttccggctttcaactgttgcaacaggcgctccacggggccgccagtccgaccgatggcggctgcgctaagttataccagagtgcgttaccttcatccatgcatgcgccagatgagtgcactgtaagccacatcggcacaatatccaggtggaaatggctgaaagtgtggcggaaggcggttaattgcgtcagattatcggcctttatctgacgttgcgccagccactcacgcagcccggcttcatcctcaaactgcggaaaacagaacaacccgccccataaccccaccggcgggcgctgggaaagaaacacctcgtcgccgtgctgcatcagcaggaagtagccggtgcgttccgggatggtctgcttcggttttttccccggatattccgcccatgaatggttagcgtaggccacgcagccgttactcagcgggcacagttcgcatttcggcttcgagcgggtacaaaccatggcgccgagatccatcatcgcctggttgaagcgttctacgccctgcgccggcgtcacctcttcgcttatttcccacagccgtttttccacctcttttttccccggccagccgctcacagcatagcagcgggcgagtacccgcttcacgttgccgtcgagaatcggataatgctgaccgagcgaaagggataaaatcgcccccgccgtcgagcgcccgacgccgggaagcgcggccacctcttcaaaggattgtgggaattcgccgccgtgcagcgtggcgacctgctgcgcggctttatgtaaattgcgcgcccgcgcgtagtagccaaggccggtccacagatgcagcacttcatccagcggcgcgttagctaaatcaacaaccgttgggaaacgcgccataaagcgttcaaaatagggaataaccgtggtgacctgggtttgttgcaacatcacttcggagagccatactttgtagggcgtcttggcgatttgccagggtagggttttacgcccgtatttgtcgtaccagtccaggacctgggctgaaaattgcgcggcgagaaaagtcaaagctacggctccggaatcgcgattacagggtggcagattgcagcacaagggcgagtggctgtaaacccttgcatccgccgggtaactttggataatgcccgttttccgaacacattcacaagcagacttaacttttatgaaaaacgacgtcatttctccggaattcgatgaaaacggtcgcccgctgcgccgtattcgtagcttcgtccgtcgccagggccgcctgacgaaagggcagcagcatgcgctggataacatttggccggtgatgggcgttgaattcaacgatgcgccgctcgatttcgccgccctgtttggccgcgaagcgccggtcaccttagaaattggtttcggcatgggcgcttcgctggtggcgatggcgaaagctaaaccggagcaaaacttcctcggtatagaagtacactcgccgggcgtcggcgcgtgcctggcttccgcggaagaagaaggcgtacaaaacctgcgcgtaatgtgtcacgatgcggtcgaagtgctgcacactatgatcccggataactcgctgaatatggtgcagctgtttttccctgacccgtggcataaagcgcgtcataataaacgtcgtatcgtgcagccgcctttcgccgagctggtaaaaagcaaactgaagctgggcggcgtgttccatatggcgaccgactgggaagcctatgccgagcatatgctggaagtgatgtcttcgctggaaggctatcgtaacctgtcggaaagtaacgattacgtaccgcgcccggaatcgcgcccggtaaccaaatttgaacaacgtggccatcgtcttggccacggcgtatgggacttaatgttcgagagggtgaaataatggccaagaatcgtagccgtcgtctgcgtaaaaaaatgcatatcgacgagtttcaggagttaggtttctccgtagcctggcgtttcccggaagggaccagcgaagagcagatcgaccagacggtcaacgatctgatcgaagaggtcattgagccgaacaaactggcctttgacggcagcggctatctctcgtgggaagggctcatctgcatgcaggaaatcggtaaatgtaccgaagagcatcaggccatcgttcgtaagtggctggaagatcgtaaattagcggatgtgcgcaccagcgaactttttgacgtctggtgggactaagtttgacaagggtcggcaattgccggcccgatttgtcttaagggagtaaaatgatgcgcaaaacgctgctggcggtggcgctttccgtcaccgctttgtctgcccacgcggactaccagtgtagcgtcacgccgcgtgacgatgtgatcctcagcccgcagcaggtgcaggtgaagggtgaaaacggcgatctggtgattaagccggacggcaatctgacctttaacggtaaaacctatgcccttagcgccgcccagcgcgaacaggcgcaagattatcaggccggtctgcgcagcagtctgccgtggattgatgatggcgcgcgctcgcgcgtcgaaaagggccgcaaggcgctggataaaatcatcaccgaacaggtcggcgccagcagcagtatgcatagccgcctgaccaagctggacgcgcagctgaaagaacagatgaaccgcattatcgaacgtcgcagcgatggcctgactttccactataaagctatcgaccaggttcgcgccgatggccagcaactggtaaatcaggcgatgggcggtattctgcaggacagcattaacgagatgggcgccaaagcggtgcttaaaggcggcggcaatccgctgcagggcattctcggtagtcttggcggcctgcaaaccgcaatccaggatgagtggaaaaaccaggaagcggatttccagcagttcggcaaagatgtctgcagccgggtggtttcgctggaagagagccgcaaagcgctggttggctcgttaaaataatcaaaatttcgcggcccgcgttcctttgggccgcgctcttctcccctcaggcgcggccgtgcgacacgcgtgaacggcgagccagagaatcaatgattaccgcaatcgccagtaccgcgccggtaatgatatagcgcagtgatgacggcagattcaacagcgtcagcccatttgaaatcgactgaatcacgatgatccccaatagcgcggaccaggcgctaccgcgtccgccgaacaggctggtaccgccgataaccgccgcggcgatggcgttgaggttgacgtcgccggtgccggcctgctgactggcggaggccagtcgtgatgcggcgagaataccgccgaaggtcgcaagcgtggtacacagaacaaaagcgctcacataaatcgcccgcacgttaatccccgaacgtcgcgccgcttcacggttgccgccgaccgcgaacattgagcgaccccattttgtccgtttcagcgcgtagttgaggatcatcacacaggcgacaaagagaccgaaaatccacggaataccgcgcccctgattgaggtaaagcaccgcggcctcgaagataatcgtcagcgcgatcgcgcgcgccagtagcgagctgactccctcggcggaaagattggccgccaggcgccgcgagcgctttttcaggccaaaaataaggatcgccagccctggcagcagcgccatcaggtgtgagaaccagccgggcatcaccagcagttggccaaagcgtaccagcggcgaagtatagggcaggttgatgctgccgctcggcccgagaatatacagctgcatgcccagcagcgccagaaggccggcgagggtggcgacgaaactcggcatcccgacgcggttatacagcagcgcgtagaccagcccgacggccacgccgcaggccagcgccacggcgatggctcccgccagcggccatcctgcgttcacccacagcacgccgacgatagccgatgccaggccactcatggagccaaccgacaggtctatctcaccaagcattagcacgcagactatgccaagcgagataaacccgaccgtcgcgcagtcaaacagcaggttcaccaggttattcggcgcgatatagaccgggttgaggaaggtgaaaaccagggaaattacaatcagcccggctatcactggcgcggtgccgagatcgccggttttgatgcgggttatctgcgcgcgtagggcgccgaacaggccctcgtcgtgacgaacgcgctcatcgctgcgatccagcgcggtgtgggatgcggtcttactgttcataaaattacatcgctccggaagtcgttggctgtgatttacgttcaacccggcgtgagacggcgttttccgtcgcgccggtgatcgcggcgaccagatcctgattggaagcatcgggcgtgaagatccctttattgcgcccgagacgtagcaccacgatacggtcggcgacggcgcgaacgtcttccatgttgtgactgatgatgatgacgccaagcccgcgctcgcgaacgcgctcaatcaggttgagcacttccgcggtctgcgcgacgcccagcgccgcggtgggttcatcgagcataatgattttagggttcagcagcagcgaacgggcgatggcgacggtctgccgctggccgccggaaagcgatgccaccggttcgcgtaccgacggaattcgtgccgccagctcctgcagcagtgtccaggctttcacttccatcgccacttcatcgagctggaacggcgaaatttcatggcccagaaacaggtttgccaccacatcaaggttttcgcacagcgccagatcctgaaacaccgtggcaataccgtattccagcgccttgccggggctatcgagggtgacgggggtgccgtcaaactcaatggtgccggaggtcggctggtggacgccggcgaggatcttcaccagcgtggatttgcccgcgccgttgtcgccgaccagtgcgaccacctcgccggcgtggacttctaattcgatatccgtcagcgcggacaccgcgccaaaatgtttagagacgttgcgcagttgcagtattggccgcccggcggcggagttgtgttgttgttgcggcatacaaaacgacctcaataatggcgaaatcgcgcccgccgcggcgggcgcaggggcaaaggttacttgctgatgcctaacttctggcaggcggcggcgtactcgccgctacatacctgatcccaggtctggatttttttatcgaagatttccgctttgatgtttttggccgtcaccacttccggggtaaatagctgggaaggggtgttgtacagggtggtgctggcctgcggttttttgccctgaataaaatcaaccgccactttggccgccgccgcggcgacgatctccgatggcttggagatggtgttgtactggtcgccggcgatgatcagctgcagcgcggcgatagtggcgtcattgccggtgaccggcggcagcggctggaccccggcagccttaaaggcggcaatcgcgccgccgccggtaccgtcgtttgccgcgactacgcccttaattttgtcgccaaagcgggtaacctgcccggcggtccactcctgggctttcggcggcgcccactccggagtgtcgaattcggcgagcgttttgtaaccggactctttcaatccgcgatggataccgtcgcggatcagccctgcggcggcatcggttggcgaaccgttaatttgcagtaccccggcatcctgcggcacgccgctcgctttcaggtggtcggtgagggatttcgcgatggcgtagccaatgccctcgttatcaaacgaaacataaaaatcggccggtttgtttggcaccgggcggtcataggcaatgaccttgaccccctgcgcctgggcgttttcgaccagcgcggcggcggcggaagagtcaaccggatccaggacgatcactttcgctccctgggcgataaccgagttgaactgctgctgctggagcgacgcgttggcgttggcattctgatagatgaccttacaatccgcgcaaagcttgctcatttccgccttaaaaccggggaagtcgtgctgttcatagcgggtagaggcctgatcgggcattaaaaaggccacggtggcggactcggcggaccaggctgaagccgtgacggtgccggatagtgcggcgagtgtgataaaaatattgcggtaattcatggtgttaccctcttttttataggcttaagcccgccgggttgcgccgacgttacagagactttttttaatcagagttaccaataattcacatgcaggatacttcggttttacatttgctcaaccgatgaagcaggattaccactgcgcaaaaaatgagtcaagaaaaggaaaaaagtcgatctgattttgtgattggctgcaaaaaagcgaacaaaaaaacgccagcggatttgcgcttagaagagagaggttagagggataaatacgggcgacgacgcgccgcccgcagggattactcttcgctgaggaacaattccagtagcgaatttaaaaacagcttaccgtgctcggtaatctgccagttttgcgcatcttccagcagatagccttcggcgatcgcggcatcgatctgcggacggataacctgctcatcaaggccggtatacaagctgaattcagcgcgcggcgcggcctccagcaggcggaagcggttcataaagaactcgaacggtttatccaccgcttccacatcgtgctggcgctccaggtaacggccttccatgtagccgcgcgggtgacgggttttcgccgtacgtagaatacggccatcagggaaggtcactttgccgtgcgcgccgcagccaatacccagatagtcgccaaagcgccagtagttgagattgtgctggcactgatagcctggtttggcgtaagcggaggtctcgtactgctgataacccgcagcgctcagcaaccgatgcccctgctcgaaaatatcccacagcgcatcgtcatccggtaacaccggcgggcgcgaaccaaacagcgtgttcggttcaatggtcagttgataccacgacagatgcggcggattcagcgcgatcgcctggcgtaagtcatccagcgcttcttccagcgactggtccggcaggccatgcattaaatcgaggttaaagctacgcagccccaggccgctcgccaggcgcgccgcgcgctttgcctcttccgggccgtgaatacgccccagacgctgcaactttggctcgctaaagctctgcacaccgatggagatacggttgacgccggcacgctgatagtcaacgaagcgatcggcctccacggtccccggattggcttccatggtgatctccgcatccgccgccagcggcaggcaggcgcgcacgccatcaagcagggtttgcatcgccgggccggaaagcaggctcggcgtaccgccgccgataaaaatagtcttaatttcacgtccttgtgcgtatggcgcatcgtggcgcagatcggcaagcaggtgctggacgtagtcgtcgtgcggcacttcgccctttaacgcatgcgaattgaaatcgcagtaggggcacttctgcacgcaccacgggatatgaatataaagactcagaggcggcaaattagccattacgtaatgcttccagtaacagtttcagcgcctgcccacggtgggaaatggcgcttttctcttcacggctcagttccgcagcggttttaccctcggacggaacaaagaaaatcgggtcatagccaaagccgccgctacccgccgcctggcgagtaatcacgcccggccagctgccgtggcataccagcggcgtcgggtcttcggcatggcgcaggtaaaccagcacgcagtggaactgggcctggcgttgctcatcgggcacgtcctgcagggcatccagcagcttttccagattctgctggtcgctggcgttctcacccgagtagcgagcggagtaaattcccggcgcgccgcccagcgcatccaccgccaggcccgagtcgtcggcgatggccggcaggccggtgacctgcgcggcgtgacgcgctttgaggatcgcgttttcgataaaggtcaggccggtttcttcggcggaatcgacgccaagctcggtctgggcgacgacgtcgagcccaaaatcttccagcagcgaggccagctcgcgaactttaccggcgttgccggtagcgagtacaactttttgcatattcaatcctgtttagtcagtcagcgccgcgacggcgggcgggatctgctgcgggtgaatgatttttacctgtttgtgacggcccagttcgcctttttcgataagcacctggcttttcgcgacgcggaactgtttagcgagatattttaccagatgggcatttgcctggccgtcgacgggtggggcggtgatggcgactttgagctcgtcgccatgcagaccaacaatgctgtcgcggctggcctttggctgaatatacagcctgagcaccagcccgtcagcgcagacttcaacggcactcatagcgccatccacagccccggaagcaggacattgccggtagcttgcagcagctcggcgatccccatattaatcacgtacagcagcagcaccagcaccatcggcgaaaagtcgatgccgcccatggatggcagcaggttgcggatcgggcgcagcagcgggtcggccaactgcatcagcacgtattccaccgggctgcggccctggcttacccagctcatgatcgccatcaacagcagcacccagaaaatcagcgaaccgatggttttcagcaggatcagcaccgcggcaatccagataatcggctggaaggtgaccaccataaacagcacgatcgccttgataacgcagagcacgaaggcgaccagcagggaggcgctatccagcggccccattgccgggataatccggcgcagcggcccgacgattggctgggtggctttcacgacgaactgtgaaaacggattgtaaaagtcgcagcgcgcccactgcatccagacgcgtaacaacatgaccattgtgtagagctcaatgaccgttgagagcaggaaggtcaacgtcttcatggcgttcctcagattccttattttttgctgtagtcgcgcgcgccgaagattgcggtcccgatgcgcaccatagtgcttcccgccgcgatagcggcttccatgtcatccgacatgcccagagagagcgtatcaactgaagggtagagcgttttcagttgcgcgaatgctaccgccatttgttgggcgacggcaaactgcctttcatactctgactctggcgccggaatggccattaacccgcgaagctgtaggttcggtaaggcggcgacaccggcggctaaagcgtcaagctccgccagcgggatcccggatttactctgctcatcgctgatgttgatttgaatcagcacgttcagcggcggtaaatccgccggacgttgctcgctcaggcgggtagcgattttcaaccggtcgacggtgtggcaccagtcaaaatgttcggccaccagccggcttttgttggactgcagcgggccgatgaaatgccattgcagaccgctggcgcccgcctgctggaaatagcggattttatccaccccttcctggacgtagttttcgccgaatgcccgctgtcctgcggccattgcttcttcgatagcgctcgcaggtttagttttacttactgcaagcaacgtaacttcttctggagcgcggccgcagcgggcggcggcgcctgagattttatcccggacctgtgccaggttatgcgcaatatcgttcatattccgaggatcagttatggagctggaagaaatcgtggcccttagtgtaaagcataacgtctccgatctacacctgtgcagcgcgtatccgccgcgctggcgtcgtttgggaaagcttgagcctgcgccgtttacttcgccggatattgaggaaatcctcactcgcaggcttaacgacctacagctggcgcagtggcgagccgatggccaggtggactttgccctcgctctggcggacgggccgcggctgcgcgccagcgcttttgcccacgcgcgaggcttgtcgttggcgctgcgtctgttgccgcagcgatgcccgcagttgggtgatttgggcgcgcccgccgcgcttagcgaactattaaatgaagagagtggcttgatcctggttaccggcgctaccggtagcggcaagtcgaccaccctggcggcgatggtggactacctcaatcaacatcgccatggtcatattttaacccttgaggatcccgtggagtttattcacgccagcaggaactgcctgatccagcagcgcgaaatcggccgccattgctcctccttcgcggcggcgctacgcgtagcgctgcgtcaggacccggacgtcatcttattaggcgagctacgcgatagcgaaaccatccgcctggcgcttaccgcggcagaaaccgggcacctggttatggcgacgttgcatacccgcagcgcggcgcaagccgtcgagcggctggtggatgtgttcccggcggaagaaaaagagccggttcgcaaccagctggctgggagtttatgcgccgtggcggcgcaaaaattgttgccaaatgcttccgggggccgggttgcgctatacgaacttttagtgaacacgccagcggtggcaaatttgatccgcgagggcaaaacgcatcagcttcccggcgtgatgcaaaccggtcaacaggcaggaatgcaaacctttgcgcagagttttcaacaacgtgcgtcagcaggtgagttatagcctatgcggtgatgaaacaaaggtagcattcattaaattgttaattcagtgttcaattaatgttttgataaatgatttcataatacaaataagtggtacgacctaagccgatataatgaatgttatgacagcgggcttacatttacctcacttaaccaggaaaaaagtgggattaccttttgacacttttacggcgttcgatttatgctgtttacgggaataggaagattctcatgaaatgatgtttcaataaccaaactgtatttgaaaatataaatacattattgaacgtttaattttcagttaatttaaccgctaagatggcggggtactgctaaggagagtttcaagtgattaatttatcggagaatttactgcattcgcgtcaggtgactttcattactcatccgtccattcagagtaatgcatttgcgacgtggttgactgagaagctatccgtaaacgtaactctgcataatatcaacaaaccgctaactcaacgtctggcaaaagactccgtaatattgtttgatattgccgtctctaataagaaattgaatagcgtatggcgagatattattcgcgtacaggcagataatccgcgtctgttgattatcaatagcgcgcaaaagtatgagctttacgaaatggcgcaatggcctgcgttatatggcgtattccgccatgacgatgaccaatcgcgcttaattgagggcgtcaaagccgtattaaacggcgagcagacggctgaattgagcgtgatgcacccggcgctgtattctgcggatcagatcacggcgccgacggagaactcaccgttgaccgagcgtgaatgtgagatcctcaacgagctgcgctgcggcgcaacgaatatggatattgcgcgcgcgctgttcattagcgaaaacacggtacgtactcatctgtacaatgtgttccgcaagctgagcgtgaagaaccgtacccaggcggtaagctgggcgaatgaacatctgcgtcactgagaacgggcgagagaggtagggccggttgagtacaggccctacttttgagcttttagtatccctgttcgaaatagctttcgaggataaccacggcagaggcggaatcaacgctgcctttattgagcgcgcgaaaaccaccgtgttcaaacaggccggcgcgggcttcgacggtgctcaaacgctcgtcgtggagggtgattttcacgccgaagcggccatgaattttattggcgaaattacgtgcgcgcgcggttagcggttgttcggtgccgtccatgttcagcggcagaccgacaatcaccgcttccggctgccactctttcaacagcttttcgatgatgttccagtccggcttgccgtcctgcgccttcagcgccgggagcggacgcgccgtgccggtaatgcgctgcccaacggcgacgccaatgcttttagtgccaaaatcaaaactcagaaaagtaccgctcattatgcatgtcccgcgtcggcaggcatcgtcacgatatcgataccgataagtttcgccgcttcgcgccagcgatcggcaatcggcgttttaaacaaaatattctgatcggccggtgcggtaagccaggcgttatcgagtatttcctgctccagttgccctttttcccacgacgcgtagcccaatgcgaccagcacgttgctcggttgtttatcggtaccgagggtttccagcacgtcacgtgaggtggtaatcaccgtgttgtcggagatacggatgctggaggaaaaatcagacggcggcgtgtgcaggataaaaccgcgatcctcagccagcggaccgccgaccatcaccggcttatccaggcggatatccgggttgcgcggctgcggcgcgattttcagtttttccaggatcccttccacctgcaaattttccagcggcttattgatgataatgcccatggcgccatcgtcgttgtactcgcagatatagacgacggagcgacggaaaagagggtcctgtagcgcaggcatggcaatcagaaagtgatgctgtaaattcattgtcagaggttctgttcctggtttaaaaaaacaacacccagtatgcgggtaaagtagaaacgtgtcgatgcactttgtttttacaggcgccagaggggcgccttgcgggcgggcgtttgcccgccccctgtgcttatttgttgatacgtttttcgatggcgtccatcagcatgccggtaatcgacacatccgggaaagcggcttcgatttcgcgcacgcaggtcgggctggtaacgttaatctcggtcaggcgatcgccgatgatgtccaggccgacgaagataaggcctttggctttcagcgtggggccgacgcggcgggcgatttcccagtcgctttcggtcagcggacgcgcttcgccacgaccaccggcagccaggttgccgcgcgtttcaccgccttgcgggatacgcgccaggcaatacggcaccggttcgccgtccacaaccagcacgcgtttgtcgccgtctttgatggccggcagataattctgcgccatgcagtagcggctacccagttcagtcagggtttcggaaatgacaccgaggttcggatcgcctgctttcacgcggaagattgaggcgccgcccatgccatccagcggtttgagaatgatatcgccgtgttcttcccagaacgctttcaactgggctttattacgggtgaccagcgtttccggggttagatcggagaaccaggcggtgaaaagtttctcgttacagtcgcgtaggctctgcggcttgttgacgataagcgtacctttctcttccgcgcgttcgagaatgtaggtggcgtagataaactcggtatcgaacggcgggtctttacgcatcaggataacgtcgagatccgccagcggcaggtcctgttcgccggtgaactcgtaccatttgtcgtaattctgctcgacgctcagcgtgcgcgtacgggcgcgggattcgccgttgatgagatacaggtcgttcatctccatataatggagttcataaccgcgacgctgcgcttccagcaacatagcgaagctggtgtcttttttgatgttgatggatgcgatagggtccatcacgatgccgagcttgatcattcttttctccattagcgctgtcgtgtttgcggaacgttgcgccagattttagcccagatcgccaaaacgcacctgcagcgcggtgatggcggtgagcgcggtggtctcagtacgcagaacgcgcggtcccaacaggatatcagtaaactgatagcgagcggtcatcgctatctcttccgccgacagaccgccttccgggccaatcagcaggcgaacacgttcaaccggcagcggcagcgtattgatgctggcgctggcgcgcgggtgcaggttgagcttaaggccgttttcttcctcggcgcaccaggcttccagctgcatcgccgggcgaatctccggcacgatgttacggccgctctgttcgcaggcggcaatagcgattttctgccactgctgaattttcttctgcaagcgttcggcatccagtttaacgccgcagcgctcggaaaacagtggcgttatgaggcttacgccaagttcgatcgatttctggatggtgaattccattttttcgccgcgtgacatcacctggccgagatggatgtgcagcggagattcacgatcgtcgatctggccacggataacctcgaccatgacgtttttcttacccgcttcggtgatgaccgcatcgaaaacctgattgctgccgtcaaacaactggatttcctgacctttgctcatgcgcaggacgcggccaacgtggtttgccgcgtcgtcgctcagggcgatgtggctgccgggggtaataggttccgggtggtggatgcgaggaatgcgcatgcttgatattccgttcttcgcgcagatagcgtcttccccatagcggggaagacggcggctgcaaattaacaattgccgctagtgtaggttagctcttttgcgcctggcaagcctgctggacgtaaggattgtggttgccctgtactttggcgattcgctcatcgcgctcgcactcccaggaggtcaccggatactgcttatcccaggcggtaaatagctgggtttgctggcgggaaagatttagctgatagcggtcgcgcatatagaagtaggtgcgagcgatagcgccgcgggcgcgtaccggcggttcggcgactttatctttgaaatccaccttcatggcgcattgaccatactgtccatcgccgccgttccactggctgtacataaagttgccgcgatcgccattgacctcgccgaccgcaggctgcaggttatgcatatcgctttccatcttgcgatattccggatctttggcgcagtttttacgtccaccatcctgccagcactggcgctggtggccgaactgccatgccgggaccacatgttcccattcgacccggctggcgcggttctcatttttacgcactttgtagccgcaagattccagatcgataacgccttttttaccctgccagtcgattttacagccgcaataaaagtcgccggggacgtcggcattcacttttacgccagcggctttcgcctgggaaaaactatgaataccagcagccgcaagtgggccgctggctgtcacgctgaataacgcgacggcaaaaacatacatacgggacatcgtaaactccgtgtcaaaacgagcccgcaacgtagcgaatgagggtgtcagatgcaatcagtcagatcagaaagtttctaattaattccggcggttacttttccgccaccagcagatcgccgcagcgaacgcagcggtatgtggcttcaccgcgcaccacgcgattatggcggcggacggttagctgatgctgctggcactggcagcgataggggaaggtgttctggcggaccgaatcaagctcaaagcgatgggtgcggcgggcggggacacccagcacggcctccatcatccatttccactctttaccgtgcggcgcgacgcggccaaagtgcttccataccagcagatgcgccagttcgtgcggcaccacttcatcgataaacgcctgctgattttccagcaatagcactggattgaggcggatctcgtttttctccagccacgcggtgcctgcggaggtgccgcgctgctgataaaccagcgtcggttccgcatagcggcgttccagcttgagattggctgtggcgagatgctcccgcaggctacgcatgacggcctgctggatagcgataggaattcggggtgttttcatagcgccagaggatagtgcgctgcgcggggagagcaagaagaagcttcctcccggattgggaggaagcacagaggggattaatcgcgagcgccgatttcgcgcagcggacgtccctgcatcaggttgcgttcaatatgttccagcgagacgtttttggtttccggaatcagccagatagtcagcaggataaacagcacgttcagaccgccgtagacccagaaggtgttggcgctgccgagagagttcagcatggtcaggaaggtggcgccgacgatcatattggcaatccagttggttgcggtggagcaggtgataccgaaatcgcggcctttcagcggctggatttcagaacacagtacccaaatcagcgggccggcgctcatcgcgaagccgacgataaacatcagcagcatcagtaccgcgaagtactgcgcggtagcagagtgaataccgatatgcatcatgctgcccagtacgcccataccggcggccatcacgataaagccgaggatcagcgtcggtttgcggccccagcggtcgaccaggccgatagcgataaaggtggccagtacgttggtcaggccgacgatcacggtgccccacatttgctcagtggtattggcatagcccgccagttcaaaaatcttcggcgcatagtacatgatgacgttcatcccggtgaattgttgcatgatctgcagcaggacgccgaggaacaccgcgcggcggaagttgctgttctctttgaacagcgcccagccggactgtttgactttcaggctttcgcggatttcatcgagctcgcgtttggcttccgcgctggtatctcgcaggcgcagcaggacgcgctcggcatcgacgaaacggcgtttagcggcaaaccagcgcgggctatccggcaggaagataacgccgatcagcagcaggatcgccgggatgataatcacgccgagcatccaacgccatgcgccgctgtagctgaaagcagtgtcagagaggtaggcgccgagaatgccgatggtaatcatcaactggtacatcgaaatcatactgccgcggattttttccggcgcgatttccgacaagtacagcggcgcggtatatgaggcgacgccaaccgccagtcccagcaatacgcgggaaatcagcaggatttcgacgttcggcgcggcggcggaaaatagtgaaccggccacaaacaggatcgcgccgatcatcaggctttttttacgcccaagtttgaaagagagccagccgctgcccactgcgccgacggcggcgccgaacatcatggagctgaccacccactcctgggtgtgcgcgctgatttggaattcattggcaataaacggtaaggcgccggcgatgacgccgatatcaaggccgaatagtaagccggccagcgcggcgaggaaacagacaaagaacgtcatcgtcttgtttgaacgcccttgttttttgttgtcaggcataacgccctccagttgagttattgattctgtcggtgcttagagtaggggagtgcaggacaaaaaaacgtgattacaatcacgactgtgtaatcggttacactaaggtaaagatatgtaatcagcaaaattacattcaaatcatagatataaaaggcaaatatcgccaataagattgcgctgaaacggtaatcttagaaataatatgtaacattgtgaaaaagtctggcgtatatcagaaactaagtaatgccaagctttatagtagatgtgtaatcgctttcatttacggcgacgagtgcggggaaaagagagcgggaagcgtcagatatggggaatgagggacaacaaaaaggccagcgcgaggctggccttatgcagtaaaaagcggggtggcttatttcaggccggccgcttcgcgcagcagggctgctttgtcggttttttcccatgggaaatgttcgcgaccaaagtgaccataagcggcggtctctttgtagatcgggtgcagcagatccagcatctgaatcagaccgtatggacgcaggtcgaagaactcgcgtaccagcagggtcagctgttcagaaggcactttttcggtgccgaaagtttctaccatgatcgaagtcggttcagcgacgccgatagcgtaggaaacctgaatctcacaacgatcggcaagacctgcggcaacgatgtttttcgccacatagcgtgccgcgtaggctgcggaacggtcaactttagatggatctttaccggagaacgcgccgccgccgtggcgagccatgccgccgtaggtatcaacgatgatcttacgaccggtcagaccgcagtcgcccatcgggccgccgataacgaaacgcccggtcgggttgatgaagaacttggtggaagcgttcagccattcggtcggcaaaatcggcttgatgatctcttccatcactgcttcctgcagggatttctgatcgatatcttcagcgtgctgagtagacagcactactgcatcgatgccgacgattttgccgtcgtcatactggaaagtgacctggcttttcgcatccggacgcagccaaggcagggtaccgtttttgcggacttcagcctggcgctgtaccagacggtgagcataggtcaccggagccggcatcagcacgtcagtttcgttagtggcataaccaaacatcaggccctggtcgccagcgccctgttccagcgggtcggcacggtcaacgccctggttgatgtccggggactgtttaccaatagcgctcaggacggcgcaagagttggcgtcaaagcccatatcggaatgcacgtagccaatttcacgcaccgtgttacgggtgatctcttcgatatcaacccatgcgctggtggtgatttcaccgccaaccagaaccatgccggttttaacgtaggtttcgcaggctacgcgcgctttcggatcctgttcgaggatcgcgtccagcacggcatcggagatttggtcagcaattttgtctggatgcccttctgatacagactcggacgtaaagaggtgttttgccatgttttattttacctgtgagtattcgtgtagctcatactgttgtgtagagaggctttgatagatgaccctaccaaggcttgcaggtagtgacacgagcagtctgagtgttaatcagtatagatggattaacttctggatggctattttaggtcagaacttcatcgcatttccacatttttttgacatcacccgcattaatggaaaaagcgtggtggaaatttttcctgacaaccccggcaaggcgcgtatttttattttgcattttaccccgcttctcggtataaaacgccgcgcgcggctcattaaaaaagcgcacgaagccccatctcgtgacgccacttccagccgggttaagcactctgttacacagcggcggtttcgccggctgttcgatatgtatagctttggcttgtcgctggcctgtttcggggcagtgtggaggtgataccagataatgaaccaacgtttttcgcctgattcgtcgcgtcgttctgtcgcgcaattctatcccgcaatctgcatctctttcgtgcaaacctgccgatgttctacccatctcggcgcttctcaggattccagggcctccaggcttattgaaaactgaacaagggcgctcttgcgtgagcaagggttttctcgtggtttctccgggctgtcataccagcttcgggtacgtgttttactatatatgaataagaaaccggtcgcgcagctacagtgccagcactatctgctgggattaaaggctgttcatgggttgttatcgcgtctgtcgactgcgatagtagttaatattacaagttgaggttcgctatgtctgacgacatgtctttgggttcgctttcgtcagcaggcgaacacggtgtactacgttccatgcaggaggttgcgatgagctcccaggaagccagcaaaatgctacgtacctacaatattgcctggtggggtaataactattacgacgttaacgaactgggccatatcagcgtttgcccggatcctgacgtcccggaagcgcgcgtcgacctggccgagctggtcaaagcgcgcgaagcccagggacaacgcctgccggcgctgttctgcttcccgcagatcctgcaacatcgtctgcgctcgattaacgccgccttcaagcgcgcgcgtgaatcctacggttataacggcgactatttccttgtctacccgattaaggtcaaccagcaccgtcgcgtgattgaatccttgatccactccggcgaaccgctggggttggaggccggttcgaaggctgaactgatggcggtgctggcgcacgcggggatgacccgtagcgtgattgtctgcaacggttataaagatcgcgaatacatccgtctggcgctggtgggtgagaagatgggccataaggtctatctggtcatcgagaagatgtcggaaatcgccatcgtgctggaagaggccgcccgtctgaacgtggtgccgcgccttggcgtgcgtgcgcgtctggcctcgcagggttccggtaaatggcaatcctccggcggcgagaaatctaaattcggcctcgcggcgacgcaggtgctgcaactggtcgaaattctgcgcgaggcaggccatcttgagagcctgcaactgctgcacttccacctcggctcgcagatggccaacattcgcgatatcgccaccggcgtgcgcgaatcggcgcgtttctacgtcgagctgcataagctgggcgttaatattcagtgcttcgatgtcggcggcggtctgggcgtggactatgaagggacccgctcgcagtccgactgttcggtgaactacggcctgaatgagtacgccaacaatatcatctgggcgatcggcgacgcctgtgaagagaacggcctgccgcacccgacggtgattactgagtccggccgcgcggtgaccgcgcaccacaccgtactggtttccaacattatcggcgtcgagcgcaacgaatacaccgaggcgaccccgccggcggaagacgccgcgcgtccgctgcagagcatgtgggaaacctggctggaaatgcacgaaaccggcaaccgccgctcgctgcgtgaatggctgcatgacagccaaatggatctgcacgatatccacatcggctactcctcaggcaccttcaacctgcaggagcgcgcgtgggcggaacagctgtatctgaacatgtgccatgaggtacaaaaacagctcgatccgagcaaccgcgcccatcgcccgatcatcgatgagctgcaggaacgtatggcggataaaatctacgtcaacttctcgctgttccagtcgatgccggatgcctggggtatcgatcagctgttcccggtgatgccgctggaagggctaaataagtcgccggaacgccgcgcggtgctgctggatattacctgcgactccgatggcgccatcgatcactatgttgatggcgacgggatcgccaccaccatgccgatgccggaatacgacccggagaacccgccaatgctgggcttctttatggtcggggcttatcaggagatcctcggcaacatgcacaacctgtttggcgacactgaagcggtagacgtcttcgtcttcccggacggtagcgttgaggttgagctctccgatgagggggatacggtggcggatatgctgcagtatgttcaactggatccgaatacgttactgacccagttccgcgaccaggtgaaaaataccggtctcgacgccgggctgcagcagcagttcctcgaagagttcgaagcggggctgtacggatatacttatctggaagacgagtagcagccgatgcccggtggcgctgcgcttaccgggcctacgaatgtaggcaggataaggcgaagccgtcatccggcagaatgctatactcacttgaacccgtatgcattaccggcgataattcacgccaataagcgatttatctatcaaacccttcctcgtcgggcctaacgacgcggaggggtttttttatacttattttttacgttccacgactgtgaaaagaggtcatatccatgagcactttaggtcatcaatacgataactccctggtatccaacgcctttggtttcctgcgtctgccgatgaactttatgccgtatgaaagcgatgcggattgggtcatcaccggcgtgccgtttgatatggcgacttccgggcgcgcgggcggccgtcatggcccggcggcgatccgtcaggtgtcaactaaccttgcctgggagcacaaccgtttcccatggaacttcgacatgcgcgaacgcctgaacgtcgtggactgcggcgatctggtctacgccttcggcgacgcccgtgaaatgagcgaaaaattgcaggcgcacgcggagaaactgctggcggccggtaaacgcatgctctccttcggcggtgaccatttcgttaccctgccgttgctgcgcgcccatgccaagcatttcggtaaaatggcgctggtacacttcgatgcccacaccgatacctacgccaacggctgtgaattcgaccacggcaccatgttctacaccgcgccgaacgaagggcttatcgatccgaaccactccgtacagattggtattcgtactgaattcgataaagataacggtttcaccgtgcttgatgcgggccaggttaacgaccgcagcgtcgatgacatcatcgctcaggtgaagcagatcgtcggtgatatgccggtgtacctgaccttcgatatcgactgtctggatccggcatttgcgccaggtaccggtacgccggtgatcggtgggctcacatctgaccgcgcgatcaagctggtacgtggcctgaaggatctgaacatcgtcgggatggacgtggttgaagtcgccccggcctatgaccagtccgaaatcaccgccctggcggcggcgactctggcgctggagatgctttatattcaggcggcgaagaaaggcgactagtttttaagcgtttactgctgctgctgcgcgacgcatgcgcagcagcagtacgccgccggcgcatagcgtgatcagttgcgatgccaccagaacggaaaaacctgaactgaccgatcccaccgatttcatcaccactcccatcagcagcggaataaacgccgcgcaaatattgccaatgccgttaatgatgccataggcgctgcccaccgcttcgcgcggggcgtgatgctgaaccaccgcggggatcgccgccccctgtaatccccagaaaatgttcgccgccagcataaacagcgccagcatcgccggctgctggctgagcatcagcgccagcacagaaccggcggtgagtaggccgccgataataaacagcagcggcgcctgctccgggcgcattttgtcgaggagcacgccgccaagaaactttgagccgaggcttaacagaaaggggacagccgccagcaggccggtagcctgcagcgagaagtggtgctcgtcgcgcagccaggcgggcaaccaggcgctactcccccatagatagctgagcgtggcgatttctaccagcaggatccagccaagcagcggcgtacgccaggcgagggcaaaagtctgcctgaatcccggcttcgcgcgctgtgcggtcacatgtggcgcggggagaaaccggcagattaatccgccgccgagcagcaaattcagcagcgccagcgcgtagaaggaaccgatccaaccaacgtgcgccatcagccaggtgaccagcggaaagcctaccgccagccccaacgatacgccgagggcggtcaccgcattcggtttgcctatttcatcggcggcgaagttgtcgttgataaagcgcgttttcagtgagaatagcggcccctccgccacgccaagaacgatgcgcgcgatcaacattcccagcagtgagctgagtagcggggaaatggcgcaaaccagcgcccatatagcaatgctgcttaagagtccctgacgataatgccatctactttctataactggggttaataataatgccgaaaacccataacccagaagaaagcatgtcattagcattccttgtaacattctgttttcatttaactgaaaatgggcagcgaattccgggttaaggatcatcaccgagatatttacccgatcgacgtaggaaataattattaacaaaagtaatgctattaccccttgccatcttgccgccatttgttgtctccacgcttaatttaattattgccagttattattttttaacgccagatatagttacataagtaaaatggttcacctatgaaactctctgtttttaaaggattaaataaatagttgtttcatcggtgaaacaccatggcttccgctgttgcacatttttaatgatcgatttgaaaagaagtcaatagtcgtatgtgaaatttaaatcggcatttttatttataatggatcaccgctttaaatatcatcatttcatctgaatgcagtttttcgtgatcaattgcacacttagctaatttaaaagccattcattaacaacttcgtcacattaacgcttgacgaaacattcaccgcttttatattgaccgtattaaataagaaacagagtttcatatatgaaacaaaagcctggaggattgcgatgagctggataggcgtatgtgacgcggagcaagtacaggaagattttccatatagcggcaatatcgacggtaaggaaatcggtatttatctgattgatggcgaatattacgcgctggaagacgtttgccctcatgcctatgcgctcctgagccagggctttgtcgaagatggcaaggtggaatgcccgctgcatgaggcggtattcgacgtcaaaaccggccagtgcctgcatggccccggcggtcgcaaccttaatcgttacccggtgcgggtatacgacaatcagatccagattacctttatcgaggagaacgtggcatgagcgaatccctggacttcaatccggcgctaccggaaagccgccagtttacaccaccggcggaaggcggaaacggcaatatccacaagcctggcgactatcacaatctgatttggcaaacccgcagccgggtgccggaaaactgggaactgcagcttatcgccaccctggaaacgttgttcgagcagggcgcggaaagtctcggtgaactggtgagcggcctcaatggcgtcaggatgcacgaccagcaaggcgaaccgtggagcgaaagcagcttccaggcatttttacaggttaacggctactgaggacacagcgatgacgacaacggtacaaaactatcttgataaagggttgcgcggcctgtggtatccagtactggcgagctgggaagtgcagtctgcgccggtaggcattacccgtctcggcgagcagatcgtggtctggcggaataaagacggtcaggtgcaggcgctggaagatcgttgcccgcatcgcggcgcacgcctgtcgatgggctggaacttaggcgatcgtatcgcctgctggtatcacggcgtggaagtcgccggcaacggcgaagtcaaagatgtcccggcggttgaccgctgcccgctggtcggccagcagtgcgtgcgcagctacaacgtgcaggaagcgcatggggcaatcttcctgtggttcggcgtcaccgccgaccagcagcctgatgaactgagcttcccggaggaactggccgacagcggaaaatacagtaacttcctgtgcaccgcggcgtggaaatgtaactaccagtacgcgctggaaaacgtgatggacccgatgcacggcacctatctgcactcatcatcgcattcgatggcggaaggcgatcgcaaagccgatatggtgctgcagccgacgaaaaccggctttatcttcgagaaaaaagggcagagcggcgtcaactttgactgggttgaactgggcaacagcggcgcctactggatgcgcctgtctattccgtacaaaaagcgtttcgggccgggcggccacttctggatcgtcggcatggtggttccggaagataacgacaactgccgcgtcttcttctggcgcatccgcggcgttcagggctggcagcgcgatctgtggcgctttatgtaccgcaaccgtctggaaaaactgcactgggaagtactggaacaggatcgcgtggtgctggagagcctggcgccgaacgcccgcgatcatgaatatctctatcaacatgacgtcggtttgtcccgcctgcgtcgcatgatgcagaaagcggcgaaagagcagttagcgcttcgcgaagcgcagcagggtgccgcctgatgaacggcctgctgaacggtaaacgtattgtcgtcaccggcgcggcgcgcggtctcggttaccactttgccgaatcctgcgccgcgcagggcgcgacggtggtgatgtgcgacatcttgcagggggagctggcggaaagcgctcatcgcctgcagcagaagggctatcagatcgaatcccacgccatcgatcttgccagtcaagtgtcgatcgagcaggtcttcagcgccatcggcgcgcaggggccgattgatggcttagtcaataacgcggcgatggcgaccggcgtcggcggtaaaaatatgatcgattacgatccggatctgtgggatcgggtgatgacggttaacgtcaaaggcacatggctggtgacccgcgaggcggtaccgctgctgcgcgaagggtcggcgatcgtcaacgtcgcttcggataccgcgctgtgggcgcgccgcggctgatggcctatgtcgccagtaagggcgcggtgattgcgatgacccgttccatggcccgcgagctgggtgaaaagcggatccgtatcaatgccatcgcgccgggactgactcgcgttgaggccacggaatacgttcccgccgagcgtcatcaactgtatgagaatggccgcgcgctcagcggtgcgcagcagccggaagatgtcaccggcagcgtggtctggctgctgagcgatctttctcgctttatcaccggccaactgatcccggtcaacggcggttttgtctttaactaacaagtgaggcggtatggcgaacgatcaggaagtgaagtacctggtaccgggtcttgagcgcggtttacaactgctgctggcgtttggcgaacagcatcgcgatctgacctttgccgagctgcatcggctggtggatatgccgaaagcgaccgcctatcgcgtggtgcagacgttggaatatatgggctttctcgagcgtaacgcccgcaccaataccttttcgctgggcatgaacgttctgcgtctgggctttgaatatatcgcttcactggatgtcgcccaggtgggtcagccggtcattgagcaactgcgcgatatcagccagtgcagcagccatctggcgatccgcgatggacgcgacattatctacatcgcccgcgtcagcgccgccggttcgcgtatcaaccaggtcagcgtcggaacgcggctaccggtgcactgcacctcgcttggccgcatgctgctgaccgatgtttcccgcagcgagtttgaacaattgttcccgaatgaacgtctgccgggcaatacgccgggccagctgtacgaccgcgaagcgctgtggcagatggtgcagcaggataaagcccgcggctacgtgattggcgaatcgttctaccgccacggcatctcatcgattgtctatccggtctttgaccgcagcggccgggtggcggcggtcgtcagcattctggtgccgtcggacgagatcccgcaaagcgatcgcgaacgattgcagaacgacgtcagtatggcggcggacaaaatttccggcttcctcggatatttgtcacaggcaagttaaatcaacaacttaatagcaggcgcttgattgcgtcgggcatgttttacgcccaaattcgggcgactgaacggtaaagaggcgacgaagaatgagtattaccggaattgaaaagctggaatttggcgtagacgacctgaaccacagcgccaaatttatgcgcgattttggcctgaccggcgacgccagcggccgcgcgtttaccaccctcagcggcgcgcgggtcgaacttaacccgactgatagcgccgacctgccgccagcctttgaggcgggcaacaccctgcgtcgcatgacctggggcgtggcggatcgggcggcgctggatgcgctgcgcccgaagctggaacgccagcccgctttccgtgaaatcgacggcgcgctggaatgccgcgatcccaacggtatgacgctgcgggtgcaggtaagccagcaaacggcggttgaactgaacgttgagccgatcaaccagtggggcgatgtgcgtcgtatcgacaccccgagcccggtgtacgaccgcgcgcagccgattaacgtcggccacgtggtgttcttcgtggaagaactggcggcggtggaaagtttctatcgcgaagtactcggcttccaggtttcagaccgctatatcaatcgcgcggtgttcctgcgctgcggcgtgcgcggcggacaccataacctcttcttattgcagttgcccaaccgcaagcgcgggctaaatcacgtcgcgtttaccgtacgggatattcatgaagtgatcggcggcggcattgcgatgaataaaaacgcgtggagcacgtttatcggtcccggccgccatccggtctcctcggcctacttctggtatgtcaacagcccgaccggcggcgcttttgagtactacaccaacgatgactatctgacggaaaactggcagccgcgcgagctggagcattcactcgtgtcctttaccgaatgggcggtggaaggcggtatcgatcacgatacccgtcgccagcagaaaaaaccggaggcggtatgacggcgcggatagtcattatcggcggcggccaggctggcggctgggcagcgaaaacgctgcgtgatgaagggtttagcggcgagatttgcgtggttgccgaagagcaatgggatttttacgagcgcccgccgctgtcgaaagcggcattgctggaggccgtaccggcgctgccgcggttattcagcgccgaggcgcaacaggcgctggatctgcgctggtaccgcccgctgcgcgcggaatcgatcgatcggcaaaataaaaccctggcgctgagcaacggcgaaacgctggcgtacgaccaactgctgatcgccaccggcggccgcgcgcggctgccatccgaggcctgggggcagtatccgcaggtgtataccctgcgccactggcaggacgcgcagcgtctgaagcagcggctggcatcggcaacgcggctggcgatcgtcggcggcggctggattggcctcgaaatcgccgcctcggcgcgcaaaagcggcgtagccgtgaccctttatgaacagcagccggcgctgtgcatgcgctcggtcagtatggaggtctcgcaggccctggatcagttgcatcgcgggcagggcgttgatattcgccgcggctgcggcgcgctggagctggaagatgataacggcctgccgacgctgcactgcgatggccagcgggaaaccttcgatgcggtggtggtggggatcggcgtcgatctgaatctcgaactggcgcgcgatgccgggctcactatcgagcgcgggattgtcgttgatgcccaggggcgcagcagcgatccggcgattttcgccgccggcgatgtcgctcagcaccatcaatacggcctgtgcattcagtcgtgggcctttgcgcaaaatcaggccatcgcgacggcgaaagcgatgctcgatccgcaggccagcggctacgacgaggcgccgtggctgtggtcggatcaatacgatcgcaatatccagatcctggggatcccgcaggcgggcagccgcaccatcgtgcgtgacgagccgcagggcgcgctctacttctcgctgaatgtcgatggacgtttaacgcaactggtggccttcaataatgcacgtaccgtgaagctggcgaagcgctggatggcggcggggagggatctctctgatgtcccgctcgctgacccgactttctcgctgatgtcattgcgataattaacgcgaacccttaaggggagaaatgaccacattagagactaacgccgcgcctgctgaggcgagcggcgagggcatccgcacgcctgaaaaggcggttcgttgggccattccgctgtcgctgctggcctgcgtactgctggcgtttttcgacaaaatcagtatcgccgcactgttttccgatagccacttccaacaggcgatgggcattgatttcgataccacccggctgggtattttgatgagcgcctttctgttgagctacggcttctcgtcagtgttattaagcggtcttggcgaccggattgcgccgctgcgcttgctaactggaatgatggtggtgtggtgcatcctgatggtgatcatgggcttcacccacaactacgcgctgatggtgacgctgcgcatcctgttgggcattgctgaagggccgctgttcccgttggcgttcgccgtagtgcgccacaccttcccgcagcggctgcaggcccgcgccaccatgctgtggctgcttggcacgccggttggcgcggcgctgggtttcccgctgtcaatttggctactcaataccttcggctggcagagcacctttttcgtgatggcgatgctgacggtaccggtgctgatttttgtgcgcatcgggctgcgcggcgtgcagctggaggcgaaagtcggcagcgataaaacgtcgcaggaagcacgccgcagcgcgcgtcgcgagctcttcgtgagtccgcatttctggatgatctgcattttcaacatcgcctttctcgcctatctgtgggggatcaacggctggctgccgggctacctgattaaaggcaaaggcattcatctggaacacgccggctggctgtcgtcgatgccgtttatcgccatgttgctgggcgaaattatcggcgcctggctgtccgaccgcgtcgataagcgcgccgccgcctgctttatttccctggcgggcgccggaatcgggctggcggcggtgatgcattttagcgcgccgttaccggtgatcgcggcgatgagttttagcacctttatgtggggcaccggcgcgccaaacattttcgcgctgctggctaaagcgacccatccacgggtcagcgccacggcggggggattttcaacgggctgggaaactttgccggggcgctatcgccggcggtgatgggcgcgcttatcgccttcacccatagcatggattccgggctgatttttctggcggtgatggcggcggtgggctgcgccctgttactgccgctgctgagacgttactgaggataaaacgatgactgattcaaccgtaactgcaaaacagagtttgaaacctgaccatatgacgatggaagagtgggtggagtcgcgtatcgcgcgctttgaaggccgtaaatacgactggaatgcgctgaaattccaggccgatttcgatccgaaatatcgccgcgcgcagatgcgctacatcggcaccggcgccaccggcgtcgccagtgataccaacaccgttccggccgagcacttcaccttctccaccatggtgttgccgtccaaatgtgaaggcccgctgcacctgcatgatgacgtagaagaggtgttcttcatgctcaaagggcagatcaccctgatgattcaggatggcgacaactataccgaaaccgtgctgcgcgaacgcgatctgatctcggtgccgcctggaatttaccgcggtttgtttaaccacggcgaagaagaggcgctgatgtgcgtgatgcttggcacccataagccgcatattccgacctacccggaagatcatccgctggcaaaagtaaaacgtaactaaggggcgatgatgacggggtttcgtgaacaaggaagcggtattccgctgacgctgctgcacggcatcagttccggcgcggcctcctggcataaacagatggcgcttcccggctaccgcgtgctggcctgggatatgcccggttatggcgaaagcccgatgctggcggcggcgccggcggatgccggtgattacgccgacgcgctggcgcgaatgctggaccgcgctggagtagagcaaaccgtactggtcggccattcgctgggcgcgctggtggcggccgctttcgccgcgaaatacccgcagcgggtgctttacctggtgctcgccgacgtcgcgcagggctacggccaggcggaagccgcacagcgggaaaaagtctggcagggacgtcaacagcagatagcgctgggcggcgaggcgatggcgcaggggcgggcggcaaaactgctgcgccccggtgcgcgcgaagccgatgtggcgacggtggcggcaggtatgcgtaggctgcgtagcgaaggctacctcgccgccgcctggatgctggcgcatgacgacatccaccgctggcttgccgactatcgcggtcgtctctcggtgtggtgcggcgagcaggatgccattacccaaccggagctggtgcagggagtggcgctgcgttacggcgcaccttacatcgccatcccgcaggccggacatgccagctatctcgataacgaaaccttttttaatcaacagcttttacgcataggggaagaggtgcgcgatgaatgcacaaattgaaggacgcgtcgcggtagtcaccggcggctcgtcagggatcggctttgaaacgctgcgcctgctgctgggcgaagggcgaaggtcgccttttgcggccgcaacccggatcggctggccagcgcccatgcggcgttgcaaaacgaatatccagaaggagaggtgttctcctggcgctgcgacgtactgaatgaagcggacgttcaggccttcgctgacgcggtcgccgcgcgtttcggcggcgccgacatgctgattaataacgccgggcagggctatgtcgcccactttgccgatacgccgcgcgaggcctggctgcacgaagccgaactgaaactgttcggcgtgattaacccggtaaaggccttccagccgcagcttgaacagtcggatatcgcctcgattacctgtgtgaactcgctgctggcactgcagccggaagagcacatgattgccacctctgctgcccgtgccgcgctgctcaatatgacgctgaccctgtcgaaagagctggtggagaaaggcatccgcgtgaattccatcctgctgggaatggttgaatccgggcagtggcagcgccgtttcgaaaaccgcagcgataagagccagagctggccgcagtggaccgccgaaatcgcccgcaagcgagggatcccgatggcgcgtctcggtaagccgcaggagccggcgcaggcgctgctcttcctcgcttcgccgctggcctcctttaccaccggcgcggcgctggacgtttccggcggtttctgccgccatctgtaaggaaagatgatgaaaaaggtcatgttaatcggctatggcgcgatggcccaggcggtgattgaacgcctgccgtcgcaggtgacgttgggttggatcgtcgcccgcgaatcgcatcatgcggcgatccgccagcagttcggccacacggtgacgccgcttaccgatccgctgcaatgcggcgggacgccggatctggtgctggaatgcgccagccagcaggcggtcgcgcagtacggcgaagcggtgctggcgcgcggctggcatctggcggtgatctcgaccggcgcgctggcggacagcgaactggaacagcgtttacgtcaggcgggcggcaagttgacgctgctggctggcgcagtagccgggattgacggcctgtcggcggcgaaagaggggggcttgaacgagtgacctatcagtcgcgtaaaagcccggccagctggcgcggcagctatgccgaacagcttatcgacctcagcgcggtcaatgaagcgcaaattttcttcgaaggcagcgcccgcgaggcggcgcggctattcccggcaaatgccaacgtggcggcaaccatcgcgctgggcggtattggccttgacgcgacccgagtacagctgatggtcgatccggcgacgcaacgcaacacccatacgctacacgccgaaggattgttcggcgagtttcacctggagctgagcggtctgccgctcgccagtaatccgaaaacatcgaccctcgcggcactgagcgcggtacgcgcctgccgtgaactggcataacgcagagaggctgagatggacgaattagacatttttatcggcggccagtggcgtcgcggcggcggcaatttgatgcacagccagtttccggcggatggcgctattaacgcggcgctgcatgcggcaagcctcgatgatttgcaggaggcgatcgactgcgctgaccgcgcctggcgggagccaacgtggcgggcgatgctgccgcatcagcgggcgaagatcctgcataaagtcgccgatctgattgaagcacaggttgatgagctcacccaaaagcagagccgcgataacggtaaaccgctggcggaagcgcgagggctggtgatgagcgcggcggggacggcgcgctattttgccgccgcctgcgagttgctggaaggcgagctgccgacgccgcggcaggcggatctattgactctgagccgctatgagccgctgggcgtggtggcggcgatcaccccatggaactcgccgatcgccagcgaaatgcagaaggtggccccggcgatcgccgccggaaatgcggtgatcctcaaaccggcggaagccacgccgctcatggcgctggagctggcgaagatctttgagcaggccggtttacccactggactgctgagcgtgctgccgggtaaaggatcgattatcggcgatgcgctggcccgccatcctaaggtgcgcaaaatttcctttaccggcggcaccaccaccggacgtcacctggcgcacgtggcggcggaaaagctgatcccggcgtcgctggagctgggcggcaagtcaccgaccatcgtgctggaagatgccgatatcgaacaggcggcgcggggcatctgctacggcattttcagctccggcggtcaggcctgcattgccggctcgcggctgtttgtccatgacaaagtgtatccgcaattaatggcccgcctgctggagttaacccaagggctgcgggttggtcatccgttcaactctggcacccacgtcgggccgctgatcaacgataaacaccgccagagcgtgctggagtacgttgagctggcgaaacgagaaggcggcagcgtgctatgcggtggcgagatcccggcggatccggcgctggcggcggggagctacttcctgccgaccatcattgaagggttgaacaatcaggcccgcgtttgccaggaagagatcttcgggccggtgctggtggcgatgcgttttcacgatgaagcggcgctgatccgcgaggccaatgattcggtcttcggtctggcggcggggatctggacgcgcgataccggccgcgcgctgcgtctgagcgaacaactggaagccggtacggtgtggatcaacacctacaaagttttctccatttcgaccccgtttggggctttaaagagagcggtctgggccgcgaaaaagggatccaggggctgaaagcctggatgcaacaaaagagcatttatctggcgacgggtaatagcgtcaaccactggtgcgactgagaaagggtgagcaatgagcgaaatgataaccgtcggcgatgccatcgccagaacgctggagcagtatcacgttgaagccatttatggcgtcatttctatccataacctgccgatcgccgacgccgtcggccagcgggaaaaaatccgctttgttccggcgcgcggcgaagcgggctcggtgaccatggctgacgcccacggccgtttttccgggctcggcgtggcgctgaccagtaccggcgcgggcgcgggtaatgcggttggcgcgctggttgaggcgatgaacgccggtacgccgctgctgcacctgactggacaggtcgaaaaagcctggctggacgccgacaccggtttcattcatgaaacccgcgatcagttgaccttcctgaaagccagttcgaagcgcgcttaccgcattagctacgccaaccaggcggtggctatcctgcataaggcgattcaggaggcgcagacgccgccgtgcggcccggtctctgtggagatcccaatcgacattcagagcgccaaaattccgctttcactgctgaccgcgccgctgaaacgcgctccggcggttgagccggaagcgtcgctggtcgatgcgctgtgggcgcagcttaagcaggcgaagcagccgctgctgtggcttggcggcggcgcgttagagagcggcgaggcggtgaagacgctggcggatgccggggtgacggtgatttccagtacccacggtcgcggcattctggcggacagccatcgcgccagcctgcgcgcgtttcataattctccctcggttgaagcgctgatttcacaatgtgatttcacacttgttgccggttcccggctgcgcagcaacgaaacgcgttcctggacgctggaactgcccacaccgcgggtgcagattgatatcgacccggcggcggctagtcgtaactacctgatggacaacacgctggtggcggactgccgcgctttattagcggcgctggcagcgcgggtgcaggggcggatgtggggcgatgcgcattgggatagccagcttaaagcggcggtagaggcggcggagcaggggctgcgcgaccagtgcggcgcctacgctaaattgaatgacgcgattgcgcaggcgctgcccgatgacggcattctggtgcgcgatattaccgtttccggcagcctgtggggcagccgtctgttccgcgctcacggcccgctgatgaatatccattctctggccggagccattggtatggggctaccgatggcggtgggtaccgcgattgccaatccgcaacggaaagtggtcggcctggtcggcgacggcggcctgagcctcaaccttggcgaactggcgaccctggcgcaggagaaggccaatgtgacgctgttgattatgaacgacggcggctacggtgtgatgcgcggtattcaggataagtactttggcggccgccagtattacaacgagctgcacacgccggactttaccctgttggcgcaggcgattggtctgcaggcgtggagcgtggaacgggcggaggatttccaggctgtgatgaccgaagcgctggcgatgccggggccatcggtggtggaagtgaaaatgggccagattggcgcgctgcgctttgccggcccgccgcagaagacgctgtattaatgataacccagtgaccccaaccctctcccttccggggagagggtaccgcacggcacaggggttaatcaaggcgccggacggttgctcctgcgcgccgggagagggccggctcacaggagagggttcatgacacggttaaaacacgttaaacggatattcgacgtagaaccgcacttcattcccgctgacgttatagtcgctggcgttgctggaaacgcgcagcaccgaatagcggagtctcagttttaaatctttcgccatgccgttttgcacctggtactgcacctggttgaaccattcgtgttctttaccgttgctggtctcggcggttttaatgttatcgccgcgaacgtaggctgtggtccagctcaggcccggtacgcccagtccggcaaaatccaggccataggaggcctgccaggaacgttcatcctcgccgttaaaatctgaccagtaggagttagccagccagatggtgttgccgccatcgccaacgccgccctgattctgatacccgccgtagtggtagccggtgctaccgctgctttgctggtaagcgactttaaaggtatgaatatcccagatatagctggcggccaggctccagatgctgttgctgcgcccggtgtcattggcgtcggcatattcttgatctaagcgcgagttatagccgttgaaatcaagaatcagctgctggtcggcggcgaacggctgcttgtagttcaggccgagatactgcttattcagcacgtcctcgacgtgcgaagcgtaaagcgcgccgctgagctggtcgttgaattgatagctggcaccgccaaaggtcaggcttttcaggccgctattgtggctgtcgtcgcttttgcgttgctgatcggtgagataaccggcgttaatttccagtccgccgatttctcttgaggtcagcatggtaccggtatagctctcatacagcagccgcgagtcatcggcgtagacgattggcagcatcgggcgctggctgccgtagctgagcacggtattcgagaagcgcattttagcggtagcgccaaattttgctaaatcggacttcgcgcggccatcatcatcctgggcgaaaaagtcgataccgcccgcgccgctgcggccgcggccgccgtcgaggcgcacggcgtactgcgcaatgccgtcaacgccgaagccgaccggtccctgggtgaagccggattcgaaggtagcgataataccttgaccccattcggctttatccggcaaaccatcgcgataatcgcgtttgatataagcgttacgtaaaaagagatccaggtggctgtcttcaataaagccctggctggtagattgttggctggcgaaagccggcgcggcggcaataatgccaagtgcgattaatggtaattcttttttcactgagggcaattctctgtctgtcgatatattcatgggaatcactgccagtcagatattctcctgaaataatgtcgaaagcaatcattgtatgagcagttattgcagccggaaacaggctgtatggcgcatgagccgtgcgccaggtagtaaggggtggactatttattattcgggtaaagacgattctggaagccagatagtgtgcgacctttttaatttaccaaataatatatttctgaatcgccgggcataaaataattggctgtgatgcgctgtgataataattaacggtttgtgcgtttaaattatcaattgatgcggctaaatatttttacgggtatataaaaaagggaggcaataatgcctcccgctgtcacttatttaataccgtcggccttcatgcgatcgcgaatatgctgcgcgcgggcttccgatgccgggtgatcgtcaaacatggagctctgacggccggcttccagcttggccagtttttcgaagctggtggccagcccgatggattgatgccgcgtttacgcagcaggtcgtaagagtagtcgtccgcttccgactcctggcgctgggagaactgcgagttcaccagtttttcgccgagatcgcccagctgcgactgtgacaggctgccgacgatgccgccagcggaggccgccgccgcgcgcacggcgttggtgcccagcgcgacctgcatccctttcttcacgtggcccaacgcaacgtggcccatttcgtggccgataaccgcttccacttcattatcgttcatcaggtccatcaggccgctataaacgcggatgcagccgttggccatcgcgaaggcgttgacgtcttttgtttcataaaccttgtagttgaccggctgaccgttgatgttatcgcccagcgccgcggcaatcttgctcaggcgtttgctgtattcgctgctggccggagaaatagtggctttggcgtccatctctttacacgcctggtcgcttaaggtttttacctgttcgtcgctaagagagtaggcctggaatgcttccgcgcccgagctcagcagggcgttggagtccatgttctgacatccggttaacgttgctgcgatcccgaaggcaagaagggttgagcgaattttcatttttatcttccacaatcttatggttttttatctgaataatgggcgacgacggacccgcctcgtcctgtgcaaagtataaatagtatctcatgatccgggcgagtggattccgcggcagcacaacgtgttccagagatttcttaatgggcaaaaggatgctccatgtacatgctttgtcgcttgggttacattgttcacacttttttccggcgtagcccaaaacgcgctctcgtcaagtcgttaagggcatggccttataacatccgaactggagtcaaaatgtcctcacgtaaagagcttgccaacgctattcgtgcgctgagcatggacgctgtacagaaagccaaatccggccaccctggcgccccgatgggcatggctgacattgccgaagtcctgtggcgtgatttcctgaaccataacccgcagaacccgtcctgggccgatcgcgaccgcttcgtgctgtccaacggtcacggctccatgctgatttacagcctgctgcacctcaccggttatgatctgccgattgaagaactgaaaaacttccgtcagctgcactctaagactccgggccacccggaagtcggctacaccgcaggcgtggaaaccaccaccggcccgctgggccaggggatcgctaacgcagtcggtatggctatcgcggaaaaaacgctggcggcgcagtttaaccgtccagggcacgacatagttgatcacttcacctacgccttcatgggcgacggctgcatgatggaaggcatttctcacgaagtgtgctccctggccggtaccctgaaactgggtaaactggtggcgttctatgatgacaacggcatctccatcgatggtcacgttgaaggctggttcaccgacgataccgcgaaacgctttgaagcctacggctggcacgtggtgcgcggcgttgacggtcacgacgctgacgccatcaaacgcgcggtagaagaagcgcgcgcggtcaccgacaaaccgtccctgctgatgtgcaaaaccatcatcggcttcggttcgccgaacaaagcaggcacccatgattcccacggcgcgccgctgggcgacgcggaaatcgcgctgacccgcgaagcgctgggctggaaatacgctccgtttgaaatcccgtctgacatctatgcgcagtgggatgcgaaagaagccggccaggcgaaagaggccgcgtggaacgagaagtttgctgcctacgcgaaagccttcccgcaggaagcagccgaattcacccgccgtatgaaaggcgaaatgccgtctgacttcgacgccaaagctaacgagttcatcgctaagctgcaggccaatccggcgaagatcgccagccgcaaagcatcgcagaacgccatcgaagcgtttggcccgctgctgccggaattcctcggcggttctgccgacctggcgccgtccaacctgaccctgtggtccggctctaagccgatcaacgaagacaccgccggtaactacatccattacggcgtacgtgaattcggtatgaccgcgattgccaacggtatctcgctgcacggcggtttcctgccgtatacctccaccttcctgatgttcgtggaatatgcgcgtaacgcggtacgtatggcggcgctgatgaaacagcgtcaggtgatggtctacacccacgactccatcggtttgggcgaagatggcccgactcaccagccggttgagcaggtggcttccctgcgcgtcacgccgaacatgtccacctggcgtccgtgtgaccaggttgaatccgcgattgcgtggaaatatggcgtagagcgtcaggacggcccgaccgcgctgatcctctcccgtcagaacctggcgcagcaggagcgtaccgaagagcaactggcaaacgtggcccgcggcggttatgtgctgaaagattgcgccggccagccggaactgatcttcatcgccaccggttcagaagtggaactggcggttgccgcgtgggacaaactgaccgctgaaggcgtgaaggcgcgcgtggtctccatgccgtccaccgacgcgttcgacaagcaggatgcggcctatcgtgaatccgtactgccgaaagccgtttctgcccgcgtagcggtagaagccggtatcgcggactactggttcaaatacgttggcctgaacggcgccatcgttggcatgaccaccttcggtgagtctgcgccggcagagcagctgtttgaagagttcggcttcaccgttgacaacgttgtcgccaaagcgaaagcactgctgtaatcgctggtacggtgcgggctgatgcccgcacctcaaccctatcctgtgggagagggtgcgaacaccacaaacggtaacccctgggttaccgttttgcttttatctcgccacccggtttttttgtaggcactattcctcgaacatgtaaccaccctgtaaattattccaaagaaaatgtgacgcaagtcatatagctggtttattgctctggacaaacattccttttattccgactttggcttattctagctgaagcgtttcagtcgtataaatgttcgacaattaatcaatcagtcgcagtttgcgacaggtaaggttcccctaaaggcgttgctggattactctgtcagccacctcaaatcagggataaccttgcaggagacctatgaccatacgcatcgcgattaatggcttcggtcgcataggacgcaacgtggttcgcgctttgtatgaatccgggcgtcgtgcggaaatcaccgtggtggcgatcaatgaactggcggatgccgcaggcatcgcgcatttattgaagtacgacaccagccatggccgtttttcctgggatgttcgccaggagcgggaacagctgtatgtcggcgatgacgtcattcgtctactgcatgagccttctatcgccgcgctgccctggcaggagctggcggtggatgtggtgctggactgtaccggcgtatacggtagccgtgaacatggtgaagcccatcttcaggctggcgcgaagaaagtgctcttttcacatcctggcggcaacgatctcgacgcaacggtagtcttcggcgtcaaccatgatgaactgcgcgcggagcaccgcattgtctccaacgcctcctgcactaccaactgcattattccggtcattaaactgctagatgatgcctacggcattgagtcaggaacggtcacgacaatccactccgcgatgcacgaccagcaggtgatcgatgcctatcatccggatctgcggcgcacccgtgcggccagccagtcaattattccggttgatactaaacttgcggcggggatcacccgtattttcccgcagtttaacgaccgttttgaggcgatcgcggtacgtgtaccgacgattaacgtcaccgcaattgacctgagcgtgacggtgaaaaaaccggtaaaggcctgtgaagtcaaccagttgctgcaaaaagcagcacagggagcatttcatggtatagttgactatacggaattaccgttggtctcgacagattttaaccacgacccgcacagcgccatcgtcgatggcacgcaaaccagggtcagtggcgcgcatctgatcaaaacgttggtctggtgcgataacgaatggggctttgctaaccgaatgctcgacacgacgttagcgatggccgcgcaaggtttcaggtaaggcgctgcggcgcttgcaaaactttatcaagaatcaacgagaggattcaccatgtctgtaattaagatgaccgatttggatctggctggtaaacgcgttttcatccgtgctgatctgaacgtaccggttaaagatggcaaagtgaccagcgacgcgcgtatccgcgcctccctgccgaccatcgaactggcgctgaaacagggtgctaaagtaatggttacttctcacctgggtcgtccgaccgaaggcgagtacaacgaagaattctctctgttgccggttgttaattacctgaaagacaaactgtctaacccggttcgtctggttaaagattacctggatggcgttgacgttgctgccggtgaactggtggttctggaaaacgttcgcttcaacaaaggcgagaaaaaagacgacgaagaactgtctaagaaatacgctgcgctgtgcgacgtattcgtcatggacgctttcggtaccgcgcaccgcgcgcaggcttccacccacggtatcggtaaattcgccgatgttgcttgtgcaggcccgctgctggccgctgaactcgacgcgctgggtaaagcgctgaaagagccggctcgtccgatggttgctatcgttggcggttctaaagtttccaccaaactgaccgttctcgactctctgtccaaaatcgctgaccagctgatcgttggcggcggtattgctaacaccttcgttgccgctcaaggccacaacgtcggtaaatccctgtacgaagcggacctggttgacgaagctaagcgcctgctgagcacctgcgatatcccggttccgactgacgttcgcgtcgctaccgagttctctgaaaccgccaccgcgaccctgaaatccgttaacgacatcaaagatgacgagcagattctggacctcggcgacgtttccgcacagaaactggctgaaatcctgaaaaacgccaaaaccattctgtggaatggcccggttggcgtattcgaattcccgaacttccgtaaaggtactgaaatcgtcgctaatgctatcgcagacagcgaaggtttctctatcgcaggcggcggtgacaccctggcggcgattgacctgttcggcatcgctgacaaaatctcctacatctccactggcggcggcgcattcctcgaattcgtggaaggcaaagttctgccggcagtagcaatgctcgaagagcgcgctaagcagtaatttagttcaggcggggaaacccgcctgtttttcagcgcgctaacgtacaattttgtacagctcgcgaaccttcttcaacggtcgaagatacagatacaggactaagtaacatgtctaaaatttttgatttcgtaaaaccgggcgtcatcactggcgacgacgttcagaaagtgttccaggtagctaaagaaaacaactttgctctgccagcggtaaactgcgtgggtactgactccatcaacgccgttctggaagctgctgcgaaagttcgttctccggttatcgttcagttctctaacggcggcgccgcgttcatcgcgggcaaaggcgtgaaaactgacgttccgcagggtgctgctatcctcggcgctatctctggcgcgcatcacgttcaccagatggctgaacattacggcgtgccggttatcctgcacactgaccactgcgcgaagaaactgctgccgtggatcgacggtctgctggacgcgggtgaaaaacacttcgctgccaccggcaaaccgctgttctcttcccacatgatcgacctgtctgaagagtccctgcacgaaaacatcgagatctgctctaagtacctggctcgcatggccaaaatgggcatgactctggaaatcgaactgggctgcaccggcggtgaagaagacggcgtggacaacagccacatggacgcttccgcactgtacacccagccggaagacgttgattacgcgtacaccgagctgagcaaaatcagcccgcgcttcaccatcgctgcttccttcggtaacgtacacggcgtttacaagccgggtaacgtggttctgaccccgactatcctgcgcgactctcaggaatatgtttctaagaaacacaacctgccgcacaacagcctgaacttcgtcttccacggcggttccggttcttccgctcaggaaatcaaagactccgtcagctacggcgttgtgaaaatgaacatcgataccgatacccaatgggcgacctgggacggtatcctgcagtactacaaagcgaacgaagcttacctgcagggccagctgggcaacccgaaaggcgaagaccagccgaacaagaaatactacgatccgcgcgtatggctgcgtgccgctcagacctctatggtgactcgtctggagcaggcattcaaagagctgaacgcgatcgacgttctgtaagaaaattctctttcttatccaaaagcccgcataatgcgggcttttttatttctcttcccagactaaatctcgtcaacaaactgtgatcggtttggcaaaatccgcacttattgtttaccctataacctgattgtcatttttctggtttggttttttaattacccgtacggggattcataaggaatgttaaatggaagatttgaacgttgtcgatagcatcaaccatgccgggacctggctggcgcgcaaccaggagttgctgctgagctatgccgtcaacatcgttgccgctatcgttatcctgatcatcgggatgatcgtggcgcgcatcgtttctaacaccgtcaaccgcctgatgctggcgcgtaagatcgacgcgactgtcgccgattttctctccgcgctggtgcgctatgcgattatcgcctttacgctgattgccgccctgggccgcgttggcgtgcagaccgcctcagtgattgccgtgctgggtgccgccggtttggccgtgggtctggcgctgcaggggtcgttgtcgaaccttgccgcaggcgtactgctggtgatgttccgcccgttccgcgccggtgaatatgtcgatctcggcggcatcgcgggcaccgtgcagaacgtgcagattttctccactaccctgcgtaccgttgatggcaagatcgtggtggtgccgaacggcaaaatcatcgctggcaatatcattaacttctcccgtgagccggcgcgtcgcaatgagtttattatcggcgtctcctacgatgccgatattgataaggtgaaacaactgctgaccgcgattatcgaatccgacgaccgcattctgcgcgatcgcgaaatgaccgttcgccttaacgaactgggcgcctcttcggtgaacttcgtggttcgcgtatggagcaaaagcagcgatctgcaaaacgtctactgggacgtgctggagcgcattaagcgtgatttcgacgccaatggcatcagcttcccgtatccgcagatggatgtacacatggtgaatcagcaggaaaaagcgcagtaattttttccagcaatggcacaagaccggcactgccggtctttttttgtctttgtatattagctttgcttattaatgattaaaattatcaatttccgctaatgttgacggcgcgctatattctccggcattaacgatgaaaccggaaaataaaacgatgctatcttattactttcaagggcttgcgctgggagcggcgatgatcctgccgctcgggccgcaaaacgctttcgtgatgaatcaggggatccgccgccagtatcatttaatgattgcgctgttgtgcgcgcttagcgatctggcgttgatctgcgccggtattttcggtggtagcgcgctgctgatgcagtcgccgtggctgctggcgttggttacctggggcggtgtcgccttcttgttatggtatggcttcggcgcgctgaaaaccgcaatgagcaataatctcgagctggccagcgccgaggtcatgaaacaggggcgttggaaaatcatcgtcaccatgctggcggtgacctggcttaaccctcatgtgtatctcgatactttcgtggtgctgggaagtcttggcggccagctggcggtcgagcccaaacgctggttcgcactggggacgattagcgcgtcattcttatggttcttcggcctggcgctgctggccgcgtggctggcgccgcgtttacgtaccgcgcgggcgcagcgaatcatcaacgtgcttgtcgggctggtgatgtggtttatcgccctgcagttggcaaaagatggcctgcaacatatacagatgctcatcaaccaggcttagtccgatggactttccgcgcgtaagcgctaagctagcaggcatgcgtccttaaaatgggcgacctaagcaagatggagaaacgacagtgaagttaaaagtcttagccctggcggcagcactcggattcagcactatggcggcgcaggcaagtgaattgccggatggcccgcacattgtgacttcaggcacagcaagcgttgcagcggttccggatatcgccactctggcgattgaagttaacgtcgcggcaaaagacgcggcttcggcaaaaaaacaggctgacgatcgcgttgcgcaatatctctctttcctcgaaaagagcggtattgccaaaaaggatatcagctcggcgaacctgcgtacccaacctgattacgactatcagaacggcaaaagcatcctcaagggctatcgcgcggtgcgtaccgtcgaagttaccctgcgtcagctcgataagctgaatggcctgcttgacggcgcgctgaaagcggggctgaacgaaattcgttccgtatcgctgggcgttgcgcaacctgacgcctataaagataaagcgcgtaaagcggctatcgatgatgcggtacatcaggcgcaggaactggctgctggcttccacagcaagctgggtccggtctatagcgtgcgttaccatgtttccaactatcagccgagcccgatggttcgcatgatgaaggcggctgacgccgcgccggtctccgcacaggaaacctacgagcaggcgaccatccagtttgatgatcaggttgatgtggtctttgaactgcagccagcgcaggctaccgcgccggcgaagccagctgaagcgccgaaaccggctcagtaagccgcagcgacaaaaaagccacttcactgaagtggctttttttatgcccgccgtttaatcctgacgcagcaccttgtggccgtaatcaataagcgcatcggtcacccggcgcatcatgcggctttccggcgcaaagcggtgccagtaaagcatccggcgctggaacagccccggcgtcaggtcgataagctcgccgctcttcagctctttctcgatctgcagatgcgggatcatacagcaggtagtgccctgacgcgccagctgtacgaaggcctccgacgagttgacgatatggcagggcacgctgcccggcggcaggtcgaagttttgctgcaggaacgcctgatgcatatcgtcgagatgatcgaaggcgaccaccggcgctttcagcagcgcagaacgcgttaccccgttagggaagtagcgttgcgcaaactccttcgaggcgacgaacaggtaatcgagcgcgccgagttgatcgaccaggcagcttggcagcgcctgcggctgaatactcaccgcgccgaccacttccccacggcgcaagcgctcctgggtgcgggtttcatcttcaacctgcagattgaggcgaataggggagtcggataacacgttggccagcgccggcagcaaccaggtcgccagactgtcggcgttgaccgccaacgacagcagcagcggcgtggagccggtctgctcatcgccaagccactcttcttccagtagctcaacctggcgcagcagagccaacagtttttgcccctgctcggtcgggcgcggcggtacggtacgcaccagcagcggttggccaaacatgttttccagctgtttgatacgctgtgagacggcggactgtgtaatgcatagcttctgcgcggcgcgctcaaacccacgttccctaatcaccgcatccagcgcttgtaatgttctgtagtccggtcgtttcattattctggcgtacccccataacttttcgttaacccgcactatgacataaatttgtttttgataaagacgaaaatggtctgctcagatgtgtgatcgccatcgcagggacatttcatccgtcgatgttctataatgcgcggtaagtattcacatctcggacgataatcatgacgcaggatgaactgaaaaaagcagtcggctgggcagcgctgcaatatgtacaaccgggcaccattgtgggtgtcggcaccggctccacggcggcgcattttattgatgcactggggaccatgaaagggcagatcgaaggcgcggtatccagctccgacgcctctaccgagaagctgaaaagcctcggaatcccggtattcgaccttaactccgtcgaccgcctgggcatctacgttgacggcgcggatgaaattaacggccacatgcagatgatcaaaggcggcggcgcggcgctgacccgcgaaaagatcatcgcctcggttgccgataagtttatctgcatcgccgacgcctccaagcaggttgatatcctcggcaatttcccgctgccggtggaagtgatcccgatggcgcgcagcgccgtcgcgcgtcagctggtgaagctgggcggccgcccggaatatcgtcagggcgtggtgacggataacggcaacgtgatcctcgatgtacacggcctggaaattcttgacgctatcgcgctggaaaacgccattaacggtattccgggcgtggtgaccgtcgggttgttcgccaaccgcggcgccgacgtggcgctgatcggtaccgccgacggcgtgaagaccatcgtcaacaaataagacgatcgggggaagtttcgcgcttcccctaaatttttttctatggccttaatttggtgacttgtgtcacatttacgtaacctttctgagtaacaatctgccatctattctctttctggtgttttgtcctgtcttttgcttcaacgtgatatttcttcaggtcggcgaggcaaacgttcatattgccgcgatagttttttttgatatgttgctggaagagtttttgttcagcacgacatcagtaccaataaaaacaggacggggaaatggctaaggtatcactggaaaaagacaagattaaatttctgctagttgaaggcgtgcatcagaaagcaatcgataaccttcgtgcggcaggttacaccaacatcgaatttcacaaaggcgcgctggatactgaagagctgaaagcgtcgatccgtgatgcccattttatcggcctgcgttcccgtactcatctgactgaagagatcttcgccgcggcggaaaaactggtggcggtgggctgcttctgtatcggcaccaaccaggtcgatctggatgcggcggcgaagcgcggtatcccggtatttaacgccccgttctcgaacacccgttcggtggctgagctggtcatcggcgagctgctgctgatgctgcgcggcgtgccggaagctaacgccaaggcgcatcgcggcgtgtggaataagcaggcggtaggcagctttgaagcgcgcggcaaaaagctggggattattggttacggccatatcggcacccagctcggcattctggcggaatcgctggggatgcacgtctatttttatgatatcgaaaacaaactgccgctgggcaacgccacgcaggttcagcacctctccgacctgctgaacatgagcgatgtcgttagcctgcacgtgccggaaaacgcctccaccaaaaacatgatggggccggaagagctggcgctgatgaaaccgggcgcgctgctgatcaacgcctctcgcggcacggtggtcgatatcccggcgctgtgcgatgcgctatcgcgtaaacatctggctggcgcggccatcgacgtcttcccgacggagccggcgaccaacagcgatccgtttaactctccgctgtgcgaattcgataacgtgatcctgaccccgcatatcggcggctcaactcaggaagcgcaagagaacattggtctggaagtggctggcaagctggcgaaatattccgataacggttctacgctgtcggcggtgaacttcccggaggtttctctgccgctgcacggcggacgccgtctgctgcatattcatgaaaaccgcccgggcatcctgacggcgcttaaccagattttcgccgcgcagaacatcaacatcgccgcccagtatctgcagactaccccgcagatgggttatgtggtgattgatatcgaagccgacggcgatgtcgcgcagcaggcgctgctggcgatgaaagcgatcccgggtaccatccgcgctcgtttgctgtactaatttgttgttgcctcacgggcaggtctggtacctgcccgtatttttttacgccttccgggcgcaattctctaacccgcatcactctctaccagcgccaggttttacctggcgtaatcaccgccggcagcgggatatcccactgttcgatcggcagcgtatccacctgctggcagtcgtgggcgtagcctaccggctgcaggcgatactgccgccagttctgtaaggtacgatcgtagaaaccgccgcccatccccaggcgttgaccgctggcatcgaaggcgaccagcggggtaatcagcacatcgagttcggccagcggcaggacatcgcgcacgtcgagcctgggttcgtaaatcttcaggcgattgaaaatcagctggctttgtggatggtaatgcaaaaacagcagattgccggggctaaacggatgcagtacgggcagataaactcgcttgcccgcccgccacaattgctcgatcagcggttgggtgtccagctcgccgtcgaaggagaggaacagcgccacggtatgagcgagaacgactggcggatacgccatcattcgctcagcggcctgcagggcgaagcgctgctgctgttcggcgctaagcgcgcgtctacgctcgcggatctgctggcgaatttgctgtctggaaagcgggatatcgggctgtatagtcatgctggtctcattacgagcaggcgaaacgatacgggaaagtgtaatacagggcagcacaggccgaaaacagagtagaggggataatgcgaatttaagaagggaatctccgagatgccgccgcaggctgtaacccttgaacccttggttcaaggtgaatgcgtcgtcacagttttaaggcttctcgggcgaaccgagcatgctcaccaaccgtggagcgccacattcttgtggtatgaaatatcggctcaggggactggcccgcttgcaaacatctcagagaaattttgttcttgcgattactctaacacagttaacgacaaagtgttattcaaacttcgaccccggtctttcgcttatgcgaccttgctcaagcaatgcctgttcgatggtctgctgaagcatgcgaatgcgctgttccatactggaggcgtagtcgcgggtcttcgctttttcctgagtcaactcatagctgatgttcaacgcggcgatgaagaccagctgctcagtatttgtgactctagtgcgttcttttaaatcttgcaaccgctgattaaggtcttcagctgcctgattcagggcatccctttgttcaggcgggcaattcactcgcagtgaacggccaaaaatttggagatctacgggttgtgcagacatgccaccttcctgctgattgactgcgctgccttcacgtccgagcccggctctgcgaaggggcgacactatagctaccctggtgcggggatacaagcccttttctggttcaccagggtccaaagtggtagcatatcatgaatattcctcccaacgatgacgaatgcgcatgtctatacagaacgaaatgcctggttacaacgatgtagaccagttactgaaccaacaaggggtgggattaaccccggccgaaatgcacggtttgataagcggcatcctttgcggcggcaacaccgacagcagctggcagccgctggtacatgacctgaccaacgaaggtcttgcctttggtcatgaactggcccaggcgctgcgtagcatgcattccgccaccagcgattcgctggaagatgatggtttcctgttccagctgtatatgccggaaggcgacaacgtcagcgttttcgaccgcgccgacgcgctggcgggttgggtaaaccatttcctgctcggccttggcgtgacccagccgaagctggataaagtgaaggatgagaccggcgaagccatcgatgatctgcgtaacattgcgcaactcggctacgacgaagatgaagaccaggaagagctggaaatgtctctcgaagagattatcgagtacgtacgcgtcgccgcgttactgtgccacgataccttcgcgcgccagcagccaaccgcaccggaagtacgcaagccaacgttacactaaataaaaacgacattcaggggcgtcatgacacagcaggagtttctttctcgtcgccaggcattattggcgcagatgcagccgggcagcgcggcgctgatttttgccgcgccggaagcggtacgcagcgcagattcggaatatccctaccggcagaacagcgatttttggtacttcaccggcttcaacgaaccggaagcgctgctggtgctgatcaaaagcgatgaaacgcacaatcatagcgtgctgtttaaccgcgttcgcgatctgacggcggaaatctggtttggccgccgtctgggccaggatgccgcgccgggtaaactcggcgtcgatcgcgcgctggcgtttagcgaaattaaccagcagctgtatcaactgctcaacggcctggacgctatctatttcgcccagggcgaatatgcctatgccgatgaaattgtgtttaacgccctcgaaaaactgcgtaaaggttcacgccagaacctgcaggcgccgaactccgtcatcgattggcggcctgtggtgcatgaaatgcgcctgtttaaatccgcggaagagctggacgtgatgcgccgcgccggcgaaatttccgctcttgcccatacccgggcgatggaaaaatgccgcccaggcatgttcgaatatcagctggaaggcgaaattctccacgaattcaaccgccacggcgcgcgtttcccgtcttataacaccatcgttggcggcggcgaaaacgcctgcatcctacactacaccgaaaacgaatccgaactgcatgatggcgatttagtgctgattgacgccggctgcgaataccgcggctatgcgggtgatatcacccgcaccttcccggttaacggtaaattcagcaaaccgcagcgtgaaatctacgacatcgtgctggaatcgctggaaactgcgctggaactttatcgtccgggtacctccatttatgaagttaatcaggaagtggtgcgcattatgattaccggcctggtgcggctggggatcctgaaaggcgagattgacgagcttatcgccaacaacgcccaccgcccttactttatgcatggcctgagccactggttgggtctggatgtgcacgatgtcggtaattacgacaccgaccgttcgcgcgtactggaaccgggaatggtgctgaccgtcgagccggggctgtatatcgccaccgacgccgacgtaccggcgcaatatcgcggcatcggcattcgtattgaagatgacatcgtgattaccgaagatggcaacgaaaatctcaccgccagcgtggtgaagaaggcggatgagatcgaggcgctgatggcggcggcgcgccagtcatgagcgtgctgattgtcggcggcgggatgaccggcgcgacgctcgcgctggccatctcccgtttgaccggcggcgcgctgccggtccatctgattgaagcgcaggatccggcgtcgtcacgccacccaggctttgacgatcgggcgattgccctggctgcgggcacctgccagcagctggcgcgcatcggtatatggcagaaccttgctaaacgagcgacgcctatccagcgggtacacgtcagcgaccgcggccatgccgggtttgtaaacctggcggcggccgattacggcctgtcggcgctggggcaggtggttgaactccacgatgtcggccagcggttgtttagcctgctgcgcgaggcgccgggcgtcaccttgcactgtccggcgaaagtggaagcggtcaaccgcagccaggatagcgtcagcctcactctcgatagcggcgaaaccatcaacggtaagctgctggtggcggcagatggttcgcgttcgtcgctgggcgcccgctgcggcattagctggcagcagcagccctatgagcaactggcgattatcgccaacgttagcaccgcgttgccgcacgaaggccgcgccttcgagcgctttaccgagcatggtccgctggcgatgctgccgatgtcgcaagggcgctgttcgctggtgtggtgccatccgcagtcgcggcgcgacgaggtgcttagctggtctgacgaacgtttttgccaacaattacagcaggcgtttggctggcggctggggcgcattacccatgccggtaagcgtagtgtttatccgctggcgttaaccaccgccatccgttcggtgtcgcaccgtctggcgctggtaggcaacgcggcgcagacattacatccgatcgccgggcagggttttaatctcggcctgcgcgacgtgatgagcctggctgaaatgcttgccgacgcccatgcgctcggcgaggatgtgggcaattattctctgctgtgccgctaccaggcgcggcgagcggatgataaagccgccaccatcggcgtgaccgatgggctggtgcatctctttgccaatcgttgggcgccgctggtggcggggcgcaacgtcgggctgatggcgatggaattatttaccccggcgcgcgatgcgctggcgcagcgtaccctcggttgggttccccgttaaggagtagaacgtgcaaagtgttgatgttgccattgttggcggcggaatggtgggactggcggtagcctgtggtttacagggcagcggcctgcgcgtcgcggtgctggaacaagcggcgccgcagcctcttgacgccgatgcgccgccggcgctgcgcgtttcggcaattaatgccgccagcgaaaagctgctggataagctgggtgtctggaacgagattattgcccagcgcgccagctgctatcacggcatggaagtgtgggacaaagatagttttgggcgtattagcttcgatgaccagagcatgggctttagccatctgggccatattattgaaaatgccgtggtgcatcacgcgctgtggcagaaggcgcaacgctgcgctgacgttaccctgctggcgcccgcgcaactgcagcaggtggcgtggggcgaaaacgaagcctttctgagcctgcaggacggcagcatgctgaccgcgcggttggtggtcggcgccgatggcgccaactcctggctgcgcaataaagccgatattccgctgaccttctgggactatcgccatcatgcgctggtggcgacgatacgtaccaccgagccgcatcaggcggtggcgcgtcaggcgttccacggcgaggggattctggccttcctgccgcttagcgatccgcatctgtgctcgatcgtctggtcgctgtcgccggaggaggcgcagcggatgcagcaggccgatgcagccgcgtttaatcaggcgctgaatatcgcttttgataatcgccttggcctttgccagcttgagagcgatcggcaggtttttccgctgaccggacgctacgcgcgtcagttcgccgcccatcgtctggcgctggttggcgatgccgcccacactattcatccgctggccgggcagggggtgaaccttggctttatggacgccgccgagcttatcgacgagctgaagcgcctgcactcgcagggtaaagatatcggtcagcatttgtacctgcgccgctatgagcgcagccgcaagcacagcgccgcgctgatgctggcgggtatgcagggattccgcgaaatgttctccggcagccatccggcgaagaaattcctccgcgatatggggctcaaactggccgattcgctgcctggtgtgaaaccacagctgattcgccaggccatgggcctcaacgatctccccgcctggttacgttaaccccgtcacacttcttttacccggcctgcgcgccgggttttctccctcatttgaaatattctaatttcacctcttttttcgcattagttttattaatgcgctcttttttttgttaaagaaattaggcccgtaaaatcgcataaaacaccatcatcacctgactggttgactcattatgttaattttatgtggcgtaaatcgcttttttccagtcaataactctgtaggcttttcagcgcgctttggtcataagctaatgtgatgtcctgatttaccttatggtttagcaccgggttcggtggtaagttcaggcaaaagagaacgtttgcgtcggcgtccgtaagcggtgccgtcgccggatttcgtggcgcaaaatcgccgacaatatcgtggctggttccgttttattcgatgaggaaaagatggctcaacagactccgttgtatgaacaacacacgctgtgcggcgctcgcatggtggatttccatggctggatgatgccgctacattacgggtcccagattgatgagcaccacgcggtgcgcggcgatgcagggatgttcgatgtgtcgcatatgaccatcgtcgatttccacggcagccggatcagagagttcttgcgctatttgctggcaaacgatgtggcgaagcttaccacgccaggcaaagcactctacaccggcatgctaaccgcttccgccggcgtcatcgatgacctgattgtttatttcctttctgaagattatttccgcctcgttgttaactccgccactcgtgaaaaagacctcgcctggatttccgaacaagctgaaccttacggtcttgaaattaccgttcgcgacgatctgtcgctgatcgcggtgcagggtccgcaggcgaaagcgaaggcggcgacgctgttcaccgacgctcagcgccaggcggtggaaggcatgaagccgttcttcggcgtacaggccggcgacctgtttatcgccaccaccggttataccggcgaagcgggttatgaaatcgctatgccgaacgagcaggctgctgatttctggcgcggtctgctggatgccggcgttaagccttgcggtcttggcgcgcgcgacaccctgcgcctggaagccgggatgaacctgtacggccaggagatggacgaaggcgtctcgccgctggcggcgaacatgggttggactatcgcctgggagcccgccgatcgtaacttcatcggccgcgaagcgctggaaatgcagcgcgaaaaaggcaccgagcagctggttggcctggtgatgaccgagaaaggcgtcctgcgcggcggcctgccggtacgttttaccgatagcgacggtaatcaaaaagaaggcattatcaccagcggcaccttctcgccgacgctgggctacagcatcgcgctggctcgcgtaccggccgggattggcgacaccgcggtggtgcagattcgtaaccgtgaaatgccggtaaaagtgactaaacctggttttgtacgcaatggcaaagccattgtgtgatttcccttttttggagatgaattgatgagcaacgtaccagcagaactgaaatacagcaaagaacacgagtggctgcgtaaagaagcggacggcacctataccgtcgggatcaccgagcacgcgcaggagctgcttggcgacatggttttcgttgatttgccggaagtgggcgccaccgttgaagcgggcgccgattgcgccgttgccgaatccgtgaaagcggcttccgatatctacgcgccgattagcggtgaaatcgttgccgtcaacgaagagctgaacgactctccggaattggtcaacagcgacccgtatagcgacggctggatcttcaaaatcaaagccagcgacgaagcgcaggttgccgcgctgctggatgcgaccgcctatgaagctctgttagaagacgaataagcctttaccctctccctgtggggagagggaagggtgaggggaaccgataataccctcaccccagccccctccctaagggagagggagaaaacacattcaccgcacgtttcaggaaccatcgctcatgactcagactttaagtcagcttgaaaaccgcgacgcctttattgaacgtcacattggctcggacgctcagcagcagcaagagatgctgaagaccgtcggcgcggattcgcttaacgccctgattggccagattgtgccgcaggatatccagctggcgaccccaccacaggtgggcgacgcgactaccgaattcgccgcgctggcggagctgaaggagatcgccggtcgcaacaagcgcttcaagtcttacatcggcatgggctacaccgccgtgcaactgccgccggtcattcagcgcaacatgctggaaaacccgggctggtacaccgcctataccccttatcagccggaagtatcccagggccgtctggaatcgctgctcaacttccagcaggtcactctggatctgaccgggttggatatcgcttccgcttcgctgcttgatgaagccaccgccgccgccgaagcgatggcgatggccaaacgcgtgagcaaattgaagaacgccaaccgcttcttcgttgccgccgatgtccatccgcaaaccctggacgtggttcgcacccgtgcggaaactttcggtttcgacgtgattgtcgatgacgccgacaaagtgctcgatcaccaggatgtttttggcgtgctgctgcagcaggttggcaccaccggtgaaatccacgattacagtaaacttatcgccgagctgaaagcgcgcaaagtgattgtcagcgtcgccgccgactttatggcgctggtgctgctgacggcgccgggcaagcagggcgccgatattgtcttcggttccgctcaacgtttcggcgtgccgatgggctatggcggcccgcacgcggccttcttcgcggcgaaagatgaattcaaacgctccatgccgggccgtattatcggcgtatcgaaagatgcggcgggtaataccgcgctgcgcatggcgatgcagactcgcgagcagcatatccgccgcgagaaagcgaactccaacatttgtacctcgcaggttctgctggccaacatcgccagcctgtacgcggtattccacggcccggcgggcctgaaacgtatcgctggccgcattcatcgcctgaccgacattctggccgacggcctgcagaagaaagggctgaagctgcgccatgctcactacttcgacaccctttgcgtcgaagtggcggataaagccgcggtgctggcgcgtgccgaagcgctgcagattaacctgcgtagcgatattcacggcgcggttggcattacgctcgatgaagcgaccacccgtgaagatgtgctgaacctgttccgcgccatcgtcggcgacgaacacggtctggatatcgataccctggataaagacgtggcgctggatagccgttcgatcccggcggcgatgctgcgcgacgatgcgatcctcacccatccggtgtttaaccgctaccatagcgaaaccgagatgatgcgctacatgcacgcgctggagcgtaaagatctggcgctgaaccaggcgatgatcccgctgggctcctgcaccatgaaactgaacgccgcggcggagatgatcccgatcacctggccggaatttgccgagctgcacccgttctgcccggtcgagcaggcggaaggttatcatcagatgatcgcccagctttctgactggctggttaaactgaccggctatgacgccgtctgtatgcagccgaactccggcgcgcagggcgagtatgctggcctgctggcgattcgccactatcacgagagccgcaacgaaggccatcgcgatatctgcctgatcccaagctccgcgcacggcactaacccggcttccgcgcagatggcgggtatgcaggtagtggtcgttgcctgcgataaaaacggcaacatcgatcttgccgatctgcgtgaaaaagcagagcaggcaggggcgaatctctcctgcatcatggtcacctatccgtcgacccacggcgtgtatgaagagaccatccgtgaagtgtgcgagatagtgcatcagttcggcggccaggtttatctcgacggcgccaacatgaacgcccaggtcgggatcacttctccgggctttatcggcgctgacgtttcgcacctcaacctgcataaaaccttctgcattccgcacggcggcggcggcccgggtatgggccctatcggcgtgaaagcgcacctggcgccgtttgtaccgggccacagcgtggtacagattgaaggcatgctgacccgtcagggcgcggtttccgccgcgccgttcggcagcgcttccattctgccgatcagctggatgtatatccgcatgatgggcgcggaaggcctgaaacaggcgagccagaacgcgattctcaacgccaactatatcgctacccggctgaaagatgcttacccggtgctctataccggccgcgatggtcgcgtggcgcacgaatgtattctcgatattcgtccgctgaaagaagagaccggcattagcgagctggatattgctaaacgcctgatcgactttggtttccatgcgccgaccatgtccttcccggttgccgggacgctgatggttgagccgacggaatcggaaagcaaggtagagctggaccgctttattgacgcaatgctggcgattcgcgcggaaatcgatcgcgttaaagccggtgaatggccgctggaagataacccgctggtgaacgcgccgcacacccagggcgagctggtgagcgagtggaaccatccgtacagccgcgagctggcggtattcccggctgggttgcataacaagtactggccaacggtgaaacgcctggatgacgtctacggcgaccgtaacctgttctgctcctgcgtgccgatgagcgaataccagtaagttgcgaattagattaactgttaaaggcgctgcggcgcctctattttttggagagaaggtatggcgatagctctgattagcggcgcgagccgcggcataggccgggcgacggcgctgctgttggcgcaagaagggtataccgtcgcggtcaattaccatcacaacattaaagccgccaccgaagtggtcaataccatagttgaatctggcggcaaagccacggcgctgcgtgcggatatcagcgatgaagcgcaggtgatggcgatgtttgaggcagttgaccgcatgggcgaaccgttgacggcgttggtcaacaacgccgggatcctgtttacccagtgtacggtggagagcctgagcgccgagcgtattaaccgcgtgctggccaccaacgtcaccggctatttcctctgctgtcgcgaggcggtcaagcgcatgtcgcatcgccatggcggcaagggcggggcgatagttaacgtttcgtcggcggcgtcgcgccttggcgcgccgggcgagtacgttgactatgccgcgtcgaaaggggcggtagataccctgacgaccgggctggcgctggaagtggcggcgcaagggattcgggtcaacggcgtgcgtccggggctgatttataccgagatgcatgcttctggcggcgaaccgggacgcgtggatcgggtgaaaggttcgctaccgatgcagcgcggcggccagccggaagaggtcgctcaggccattgcctggctgctgagcgacaaagcgtcgtatgtgacgggtagcttcctcgaactggcgggcggtaaataaccctggccatcgttcaatagcccggctgagcgcagcgcgagccgggtaacccgacggtctaccaggaggccagccacagcctcaggcgcattccccaactgctggtccagccggtggtaaccgacttcacctcaccttgagaaatgaccaccagcgttggcgttacctggatatcccactgccgcgccaactggccgctcggatcattcaccgtcggcagcgtcattttcttcctggtcagccacttctccagcgcggcgttatcgccggaacgcagggctaccgtcagcacattgccgccgtcggcggcaagcgatgccaccgacggcgtggtatagcgacagactccgcaccaggttgcccagacgtacagcagcagcggcttttgctggctcatggcgttcagatccagcgtcctgccgtcgagtgtctgcagcgatgtggcgctgacgttttgcggcagcgcgggctggcgaaaataatccaccgccaggctcaccgccgcgccaatcagcagccacaccgccagctcgcgcaaccagcgcctgattttactggccacgggctttcgccagctgttctttcaccagcccctccaggtcttcagcagggatcgcgccggccaccatctgatcgccgatgatggtcgccggggtgccctgaatattcagcacctgtgacaaaatcaggttcatcttcagcgaatccatggtcttgtcatcaatactgacgctatcggtggcggttttcttctgcgcagaggcgatactggcgtcatcgtgatagcctttttttgccatcagccgctgatgcagcacccagaatttatcgggctgctgacgccaggtggagagcgcggctttagcggcattcaccgaactctgccctttaaacggcagcagcttaacgatgagctggatgtccagattatcgtggacgattttttccagcatcggatcaaactgtttgcagtaaggacagttgtaatcggtaaacgagacgatcgtgagcttcggcgctttcgcgccggtgcgcgggctgttcggatcgttaaacagcaactgggctaactggtcattaccattcgattgtggctcttccgccggggcggcgaagctgaaggacgatacacacagcagtaataaggcggtgatagctctcatgttattttcctttagcggcggacagggtggcgagaagttgttcgcggtctaacagcgcaggcagaatctgtccctgcggcaatcccggtccgtaaatctggttaaacggcaccgcggcgctgccgcgagcggttaaaaactgactaatgtcagcggaggggcggctccagtcgccgcgtaaggcgaccacgtctggcgctgatagcgcctgctggacgtcgtcgcgcagcagcacgttgtatttattggctttacaggtcacgcaccagtcggcggtgacatcaataaatacccgtttatgctccgcaagggcgttagcgatagcctgctcgctgagcggctgccagttaacccggtcgcggcgcgggccctggccgtcctgttgtgcgacaaaggcgacggccccgccaccacgatggccagagtgcccgcgcgcagcgccgtacgccagcggtagcgccaggcggtggccaataacaggccgatggccagaatcaccagcagggtaagcaccggcgtgcggccgatgtggatcgtcagcaggctgaccagccatagtgctgaaccaagcatcattagccccaacaccacgcgcagatgattcatccagcggcctggacgtggaagtcgttgcgccagccccggccaggcgacaataagcagccacggcaggctcatgccgatccccatggcgaagaaaataccccacagcagcggcagtggcgccaccagcgccaccgaaacggcggtaccgaggaacggcgcggtacagggcgttgccagcagggtggcgaaggcgccctgccagaaatggcccattaagccgttaccgccccgggtggcgaggaaggtgctggcgctggaggagagacggatttcgaacagccccaataaactggcgctgaacagcaccatcaccagcgccatcgcgccgataaaccacgggttctggaactggatcccccagccgagcgcctgattgcctaaacgcaatagcgtcatcatcaaggccagggccaggaaggagacgacgatcccgcataccgaggcgaggaactgccgccgcaccgcgccgcgttcgcgacgttcggtttgcaccagcgagccgagcttcatcgccagtaccggcagcacgcacggcattacgttgagaataagcccgccggccagcgccatcagcagcacccagcctaatgccactcctgccgcggcgctgccggcggcgacggcgatttggctttcctgcgcctggccgctatcggccagcaccagcgacagcgttttgccgctcagatccggcgccgcctcgccccaactatcggtgaccggtacggtggcggtcaacgtatcgccgcggctggtaaagctcggcttgccgaaatcgacatcctccatgctgtcgataaacagcgctggctgctgccagccggcatcgcggcgggcagttaccgtcagcttaccgctgacgtagctggcgctaagcgccgaggtgagaccgtcgcgcaggggcagcgtgcccatcgcgcgggtgaaatcgtaattaaatcgctcccccgccggagccgtcatatccagcgaaaagggatagtcagtgagaatgcagacattgctgcaggtagagagcgtcagtacgccgctaagcgtcggcggtattttcccgcgtagggtcatcgggaaactgacgttgccgtgatacccctgagtggaaatacccgcgacgtcgaagcgttgcggcgtcggccagcgccagttcacctccagtggcgtgcgccaggcgatagccggcgcgatgccgccttcgcccggcgaacgccagtaggttttccagcccttttccagcgctacgtctaaaagcagtcgggtgtcgccattgccttcgctttgcgcccgcaggcgcacgctggcgtgttgattgtcggcgacgcgcagccagccgctatcggcggcctggctgacgggcagccatagccaaagcaggcagaccagcagtcgcctgaataccataaacataaattttctccgtaagtaataaattaacctgagctgtcaggagaattaatcactcacggaagacgcataatcgtagatgcacccgcaatcggggaggagaaatgacgcggggaggccagatacgctcgatgcgtggcgggatcgccgccagcacagccagcagcagggcgatagcgagtagcgccccttcaaacagcatcggcggaacggccatcagcgacttggcgctgagttcgcagggggagaccggcgcctcggcattatctggcccaggttgggcggattggctggcggccgtgacgttcatcaccaacgcatgcatccccgccattctctgggcggtgcagatcagcaccaccaggcaggcaaggattacaagaagaatggctttgcgttgtcgcttaatcatggtcgcctcaaatattcacgaggcctatcttatcgggcgaacgcgttttagcaatggtaaagctgtaaagaagtgtctggcggataagtgatttgccccctcccggccgggagagggcggtcaattacagattctcgccgttgctggcgatgacttctttgtaccagttaaagctctttttgcgcgagcgggacatatcgccggtgccgtcgtcgtgtttattaacgtagatgaagccgtagcgtttgctgtactggccggtagtgaaggagacgcagtcgatgcagccccatggggtatagcccatcagatcgacaccgtcataagtaaccgctttgatcatctcttcgacgtgggcgcgcagataatcgatgcgatagtcatcgttgatgctgccgtcggcttctactttgtcgtaggcgccaaagccgttttccacgataaacagcggcttctggtagcgctcatacagttcgcaaagggcgtagcgcaggccaaccgggtcaatctgccagccccagtcggaggctttcacgtgtgggttcggcacgctgccttcgaagccggaaatggcatcgccggtgccgccttcggctttcaccgcgttggtcatgtagtagctgaagccgagataggcgcaggtgccgtcacgcaggatctgcgcgtcgccgtcttccatcttgatgttgaagccgcggcgttcccattcattcaacacatagctcgggtagtaaccgcgcagctggacatcggtaaagacatagcgttcgcgcatcgactcctgggcaaacatgacatcttccggtttgcaggagtaagggtagagggcgaccatcgccagcatgcagccgacctgcatttccgggttgatacgacgcgccgctttcaccgccagcgcgctggcgacgaactggtgatgcagcacctggtacatggtctcttccgggttttcatgctcggtatagaccacgccggaacagcagtagccgaatagcggcgcgcgccagttacgctgattattgatctcgttaaaggtcatccagtatttcactttgtgcttatagcgctcaaagactacttcggcgaagcgcacaaagaaatcgaccactttacggttggtccaaccgccatactgctgtaccagatgcagcggcatttcaaagtgggaaagggtgatcaccggctcgatgttgtacttcagcagttcatcaaacatgtcatcgtagaatttcagcccttcttcattcggctgagtttcgtcgccctgcgggaagatgcgggtccaggcaatagaggtgcggaagcatttgaaacccatctcggcgaacagtttgatgtcttctttgtagtggccgtaaaaatcaaccgcttcatggttagggtaatatttacccgcctcgacctgttgggtgatttcgcgcggcacgccgtgcgccccgccggtcaaaacatcgcagatgctggggcctttgccgcctttattccagccaccttcaacctgatgcgcggcgaccgcgccgccccataaaaagtctttgggaagagtcaattttttcatctttgctaatctctatgaataactattgcgattgagtctagcaaagcgaaattgaatgtcacgatataacaaatcccgctaaaggtaatatgttacatagaaaaaacaggctgttactttaagccgattttgcgcgctaatttacgccccagtgattcgagaatatatatcaccggaatctgcgttgtaatatcgtaaacgccgccgatgcgcgtttgcggcacgtgccaggagagattgaaatcagccagttttgccagccgcgaatgctcatggctggtaatcgacatcaccttacagtgatgcagactgaactggctggcaaagcgcaggatctcttcagtttcgccggagacggaaagcacaatcgccagcgcgttgcgggccatgtcattagttaccgggaaataaggatcgtcaatatggttgctgaatttcccgacgttggaaaagaagcgcgcgccatatttcgccagcgcgccggaggtgccggcgccgacgaaaataatacgttcggaggacagaataatatcgacggcctgttcgagcaattgatcgaactcgtcattattgacgcttttaaaaaagctcattatttcgctggcgccgatatttgcctgttgaggctcattctgctcaagatataatttaaagcgtacgcgaaattcagagtagccctcgcactgcagtttgcggcagaagcgcaacacggtagtggtggagaccccggcggcctcggccagttcgcgaatagtcatgtacatcactttgtcacgattcttaatgacgtagtggtagaccatcatctcaagattattgagactggcgacagcggcgtgggagaacatactcacagtggcgaactcacaattcataaagaccaggacggaattatatcatgcaggctaatgacattaccttttttcagcgttttcaggacgacatcctcgccgggcgcaaaacgatcaccattcgcgatgcggcggagtcgcactttaaggccggtgatgtgctgcgcgtcggacgctatgaagatgacggctacttttgcactatcgccgttaccgcgacctcaacggtgaccctcgacacgctaactgaacagcatgctcaacaggagaatatgaccctcgaacaactgcggcaggtcatcagggaaatctatcctgcggaagatcggttttatgttattgaattcaaacgtctttaaataaaaccagcacagctgttagttgaaatattgttgtaacactatgattttaatgtgtttacaaatatacatcgttttattttagctaacaggtgttcactggaatcattctcagttaacctaagtgggcaatgaaagcgttcttgttttcacggagtcaaaatatggttcgcaaaccattaatcactcagggatattctctggcagaggaagttgccaacagcatcagtcacgggatcgggctggtgttcggtattgtcggcctcgtgttgctgctggtgcaggcggtagacacgaacgccagcgcgacggcgatcaccagctacagcctgtacggcggcagtatgattatgctgttcctcgcttccacgctctatcacgctatcccgcatcagcgggcgaaacagtggctcaagaaattcgaccactgcgccatctacttgctgattgccggaacctacacgccatttttgctggtgggattgaattcgccgctggcaaaggggttgatgattgtcatctggagcctggcgctactggggatcctgtttaaactgactatcgcgcaccgctttaaaattttgtcgctggtgacctatctgacgatgggctggctgtcgcttatcgtggtctatcaactggcggtgaagctggcggtgggcggggtaacgctgctggcggttggcggtgtggtgtactcgctgggggtcatcttctacgtctgcaaacgtattccttataaccacgctatctggcacggcttcgtgctcggcggcagcgtgtgtcacttcctggcgatttatctttacgtcggccagtcctgatcaaacttccacggtggcgctacgcttaccgtggctacgatactctgcaggctggtagcccggctgaggcgcaagcgccgcaagccgggaactgttccttaatcttcttccagcgaatacggcaatggtttgatgctcaggctgccggcatcgtcacgcacgcggaacacgctgtccggttccatatcgttattcatcaccacctggaccatcaggcttccgtcatccaactgtacagctgccagcaccgtaccggtgcggcgccagttgtcgcccattttcagctccagatcttccccggcttccggcacccggctggcggtacccgccagcgtccacagcgcgcgtttattggcgccgcggaatttcgcccgggcaaccatttcctggccggtgtagcagcctttcttgaagctgataccgcccaacgcctgcaggttggtcgcctgcggaatgaactgcgcgctgtttacgctgtcgataaccggcagaccagcctcgatgttcagcgccagccactgctggctgttgttaagctgcgcttcgccgcgcagcgcgtctgtcacccggttggcggtgtcggcatcggtcaccagcaggaagcgttcggcaggatgttcaaaccacagcaggctggtcacgccttcggtgaccaccggtttaccggcatccggcagcgcggcgaacagcggcgccagcgcggcgcgcgcctggaaaccggccacgcccagcaggaccagatcgtcgtttgcggcgatggtgactttggagaagacggcatattttttcagttcggtcagctgcgcttcgcgcaggctgcggcgctcaatccacgcgaaaccgccgtcgcggtggaagacgcgcaggttgctccacattttgcctttggcatcacagtgcgcggcaagcagatgctgctcggcggttaaatggctgacatcggcggtgatctgcccctgcagatacttctcgccatccggaccggtaattgtcgccagcgcccaatcatccagcgtcatcagcgttaacggcagacgagcggaagaagaaggctgacgcggaggaaaaggtgtaaaagccatagtcatatcctgaatagcttaacgcagagtgaatgactaatggtaaaagagctatggtgcaatgcaagcgctttcggcaagccatttgtgccctcaggatgcggtgaatagccaaccggattttgggcttttatggaatgctgctcgcacaaggcgatattactgtaaagtaagtgcctaaaaagggttaaactaagctatatcttgatgctggaaggacaacatggacattaacaacaaagctcgcatccactgggcatgccgccgcggtatgcgcgaactcgatatctccatcatgccgtttttcgagtatgagtacgacacgctcagcgatgacgataagcgtctgttcatccgtttgctggagaacgatgatccggatctgtttaactggctgatgaatcacggtaagccggcagatgcgcaactacaacggatgataaatttaatccagactcggaatcgggaacgtggtcctgtggcaatctgatttacgtatttcctggcgttcgcagtggttctcgctgctgctgcacggggtggtggcggcgatagtgctgctaatgccctggccgttaagctacaccccgatttggctcctgttgctatcgctggtggtgtttgactgcgtgcgcagccagcggcggatccacgcctgccagggagaaattaagctgttgatcgattcccgtttacggtggcaaaaaacggaatgggatatcgtcgggacgccatgggttatcagtagcggtatgctgctgcgcctgaagcatgcggaaaccggccgtagccagcatttgtgggtggcggcggatagcatggatgcgggggaatggcgggatttgcgccggctggtgctgcaaaaaccggcgcacgactaactcaggatcaggcgaagtgctccgccatttcgccgaggatctgctcgcaccagttctggatgcgctcatcgctcaggtcgtattgattggtttcatccaacgccagtccgacgaacaactggccatcggcgataaccggttttgggctggtgaactcatagccctcggttggccagtagccgataaaattcacgcctttggtcgccagcttatcgtgcagcatccccagcgcgtcaaggaaccattcgccgtaaccaagctgatcgcccatgccgtacagcgcgacgattttgccattcagatctaaggcgtcgagctgttcccagaccgcttcccagtcttcctgaatttcgccgaaatcccaggtcgggatgccgagaatcagcacgtcgtactggttcatcagcgcgggggagtcatctttcagattatgcagcgtcaccagctcggggccgatgatatcgcggattttttccgcggccatttcggtgtagcaggtactggagccgtaaaaaagacctatattcatcgcgtaaacgtctcaattcttgccgtgaattgcgcccagtgtaccagaaaggcggcctcttaaggcataatgagggcgtataacgaacaaagaggccgatgtgaaacaggatctggcacaaattgaacagtttctcgatgccctttggctggagcgtaatctggcggagaacacgcttagcgcctatcgccgcgatttgacgatgctcgtggagtggctgcatcatcgcgggctgactctggcgagcgtcggcagcgacgatctgcaggcgctgctggccgagcggcaaaccggcggttacaaagcgaccagtaccgcacggctgcttagcgccgtgcgccggttcttccagcatttgtaccgggagaaaatccgcccggacgatcccagcgcgctgctggcttcgccgaagctgccgcagcggctgccgaaagatctcagcgaggcgcaggttgagcgtctgctgcaggcgccgctggtggagcagccgctggagttgcgcgataaggcgatgctggaagtgctttatgccaccggtctgcgcgtctcggagctggttggtctgacgatgagcgatatcagcctgcgacagggcgtactgcgggtcattggtaaaggcaacaaagaacggctggtgccgctgggcgaagaggcggtgtcatgggtagaaaattatctggaatacggacgtccgtggctgctgaacggcgcggcttcggacgtgcttttccccagccaacgcgcgcagcagatgacgcgccagaccttctggcatcgcattaaacactatgccgtactggcggggatcgacagcgcgaagctctccccgcacgtcttgcgtcatgcgttcgccacgcatttgctcaatcacggcgccgatttacgcgtggtgcagatgctgttaggacacagcgatctatccaccacgcagatctacacccacgtggcgaccgaacgtttacgacaacttcatcaacagcatcacccgcgggcgtgagtgctgaataaaaggactgagtatgaaaaaaggtttattgatgttcaccctgctggcggccacgctctccggtgcggcgcatgccgatagcgcggcgatcaaacagtcgctggcgaagctgggtgtgcagagcaccgatatccaaccgtcgccggtttccgggatgagcacggtgctcaccgacagcggcgtgctgtacgtcactgacgatggcaaacacattattcagggaccgatgtacgacgtcagcggcgcgcagccggttaacgtcaccaaccagttgctggtcggcaagctgaacgccttaagcaaagagatgattgtctataaagcgccgaaggagcagcatgtcattaccgtctttaccgacatcacctgcggctactgccataaactgcacgagcagatgagcgactataacgcgctggggatcaccgtgcgctatctggccttcccgcgccagggcctgcaaagccaggccgagcaggacatgaaagcgatctggtgtgcgaaagatcgcaacaaagcgctggatgacgccatgaatggtaagggcgtacagccggcgagctgcaatgtggatatcgctaaacattacacgcttggcgtacagatgggcgtcaacggcaccccggcgatggtcctcagcaatggtatggtgctgccaggctatcaggggccgaaagagcttaaagctttcctcgacgagcatcaaaaacagactagcggtaactgattcgcgtgaaacaacagatacaactacgccgccgcgaggcggttgatggcgtcgacctccccgcagacctgccgccgctgctgcagcggctttatgccagccgcggcgtgcgtagcgcgcaggagctggaacgcggcgtcaaaggcatgttgccatggacgcaactcaccggcgttgaaaaagccgttgaaatgctgcatgaagctttccagaaagagttacatattgtggtggtcggcgattttgacgccgacggcgccaccagtaccgcgctcagcgtgctcgccttgcgcgcgctgggctacggcaacgtatcttatctggtgccgaaccgttttgaagacggctatggtttaagcccggaagtggtcgagcaggcgcacgcgcgcggcgcgcagatgatcatgaccgtcgataacggtatttcatcgcatagcggcgtcgatcatgcccatgcgctgggcatcccggtgctggtgaccgatcaccacctgccgggtgatacgctgccggcggcggaagctatcgttaacccaaatctgcgcgattgcgacttcccgtcaaaatcactggccggggtcggggtggcgttttatctgatgctggcgctgcgtaccttcctgcgagataacggctggttcgaggcccgcggtatcgccgcgccaaaccttgccgaactgctggatttagtggcgctgggcaccgttgcggacgtggtgccgttagatgctaacaaccgcatcctgacctggcaggggttaagccgcattcgcgccggaaaatgtcggccaggcattaaagcgctgctggaaatttctaaccgcgatccgcaaaagcttgccgccagcgacctcggtttcgccctcgggccgcgcctgaacgctgcggggcggctggacgatatgtccgtcggcgtcgcgctgctgctgtgcgataacattggcgaagcgcgggtgctggccaacgagcttgatgcgcttaaccagacgcgcaaagagatcgaacaggggatgcaggccgaagcgctgactctgtgtcagcagttggaacgcagtagcgacaccctgcccggcgggctggcaatgtaccatccgcaatggcatcaggggtggtcggcattctggcatcacggattaaggagcgcttccaccgcccggttatcgcttttgcgcctaccggcgacggcacgctcaaaggttctggccgctctattcaggggctgcacatgcgcgatgcgctggagcgccttgatacgctttatcctgggttaatcctgaagttcggcggccacgcgatggcggcgggcttatcgctggaagaggcgcgctttgaggagtttcaacagcgcttcggcgagctggtgaccgagtggctggatcccgcattattgcagggcgaggtagtttccgatggcccgctggaggccgcggagatgagtatggaagtggcgcagatgctgcgcgatgccgggccgtggggcaaatgttcccggaaccgctgtttgatggccgttttcgcctgctgcagcagcggctggtgggcgagcgtcatctgaaagtgatggtcgagccggttgacggcgggccgctgctggacggtattgccttcaacatcgatacttccatttggccggataacggcgtgcgtgaagtacagttagcctacaagctcgacatcaacgagttccgcggcaaccgcagcctgcagttgatcatcgatcacctctggccaaattgacaacagtgtattaataagggcgcgaatccggtagaattccgctcttatcaccgcattttgacaaatccattaaaagaaaccgaccatgtttgaaataaatccggtaaaaaaccgcattcaggacctcacggagcgctccgacgttcttaggggtatctttgactacgatgcgaagaaagagcgtctcgaagaagtaaacgccgagctggaacagccggacgtctggaacgaacctgagcgcgcacaggcgctgggcaaagaacgttcttccctggaagctatcgtcgaaacgctggatcagatgacccagggtctggaagatgtagccggactgctggagctggcggtagaagccgaagacgaagagaccttcaacgaagcggttgccgagctggacgggctggaagagaagctggcgcagcttgagttccgccgcatgttctccggcgaatatgatagcgccgactgctacctcgacattcaggccggttccggcggcaccgaagcccaggactgggccagcatgctgatgcgcatgtacctgcgttgggcggaagcgcgcggctttaagaccgaaatcatcgaagaatccgaaggtgaagtcgcgggcattaaatccgtgaccatcaaaatcatgggcgattacgcctacggctggctgcgtactgaaaccggcgttcaccgcctggtgcgtaagagtccgttcgattccggcggccgccgtcatacctcctttagctcggcgttcgtttacccggaagttgatgacgatatcgatatcgaaattaacccagccgacctgcgcattgacgtataccgcgcttccggcgccggtggtcagcacgttaaccgtacggaatccgcggtgcgtattacccatatcccgaccgggttagtgacgcagtgccagaacgaccgttcgcagcacaagaacaaagaccaggccatgaagcagatgaaagcgaagctttatgagctggaaatgcagaagaaaaatgccgagaagcaggtgatggaagataacaaatccgacatcggctggggcagccagatccgctcttacgtgctggacgactcgcgtattaaagatctgcgcaccggggtggaaacccgcaacactcaggcggtgctcgatggcagcctggaccaatttatcgaagcaagtttgaaagcagggttatgaggaaccaacatgtctgaacaacaagcacagggcgctgacgcggcaattgaccttaataatgaactgaaaacccgtcgtgagaagctggctgcgctgcgtgagcagggcgtcgcattcccgaacgatttccgtcgtgaccatacctctgaccaactgcacgctgacttcgatgccaaagaaaacgaagagctggaagcgctgaatgtcgaagtggccgttgctgggcgcatgatgacccgtcgtatcatgggtaaagcttctttcgttaccctgcaggacgtcggcggccgcattcagctgtacgtcgcgcgcgatgacctggcggaaggcgtctacaacgatcagttcaaaaaatgggatctcggcgacatcatcgccgcccgcggtaagctgttcaaaaccaaaaccggcgagctgtccatccactgcaccgagctgcgtctgctgaccaaagccctgcgcccgctgccggataaattccacggcctgcaggatcaggaagcgcgttaccgtcagcgttacctcgatctgatctccaacgacgaatcccgtaacactttcaaagtacgttcgcagatcctggctggcatccgtcagttcatggttggccgcggctttatggaagtagaaaccccgatgatgcaggtgatcccaggcggcgcttccgcgcgtccgttcatcactcatcataacgcgctggatctggacatgtacctgcgtatcgcgccggaactgtacctcaagcgtctggtggttggcggcttcgaacgcgttttcgaaatcaaccgtaacttccgtaatgaagggatctccgtacgccacaacccagagttcaccatgatggaactctatatggcgtatgcggattataaagatctgattgagctgaccgaatccctgttccgcaccctggcgcaggacatcctcggtaataccgcggtgccttatggcgatcagactttcgatttcggtaaaccgttcgaaaaactgaccatgcgtgaagctatcaagaaataccgtccggaaaccgagatggcggatctggataacttcgattccgcgaaagcgatcgctgagtccatcggcatcaaagttgagaagagctggggtcttggccgtatcgtgaccgagatcttcgaagaagtggcggaagcgcatctgatccagccgaccttcatcactgaatacccggcagaagtttctccgctggcccgtcgtaacgacgtgaacccggaaatcaccgaccgctttgaattcttcatcggcggccgcgaaatcggtaacggctttagcgagctgaacgatgccgaagatcaggcgcagcgtttccaggatcaggttgatgcgaaagccgccggcgacgacgaagcgatgttctacgacgaagactacgtcaccgcgctggaacacggcctgccgccgaccgccggtctgggcatcggtatcgaccgtatggtcatgctgttcactaacagccacaccatccgcgacgttatcctgttcccggcgatgcgtccgcagaaataatcgcttttggcgaaaagcaaaaaacccggcttgccgggtttttttatatttgatgtcaaggttcgtctctggcgtagcccggctctttaatgcttgtcagttgcggttacgcgcgtaaactcgcaacaaagtctatcaacgcctgacgcgcatttttgtttttggcttccagcaccatccacgggctaaaggcccacggggtagcggccagcgcgcttaacatttccggcagctcaacccactgataatccatcacttcatcatcattcggttgcagctcgctgaccacgcaagcggcatacaccgggcagacttcgttttcgacgatgccattcggggcaaccgcccgatagcggaaggccgggtggacggagacaatatcagcgatctcgacgcccagttcgaagcggcagcgccgggtgacggcctgctcgaaggtttcgccctgttgcggatgtccgcacacagagttagtccacacgccgggccaggcttttttgctaagcgaacggcgcgtaaccaggaactggccttgctcattgaacaaccagcaggaaaacgcgagatgcaaaggggtatcgagcgtgtgggcggcatacttctccagcatacctgtgggtttatcttgctcatccagcaaaatgacgtgttccccggccatgacgactcctgaaataaataaatgacccggcacaaacccgccgggtcatgtactcaggccactagggtagcccataaatgggagaaaggcattaccaaaacaagccctggtagcatgttggcgaccgggaaaagcttgatgttacagatacgcaacccggtcgctaccatcagcaatccaccggcgcaggagaaatccgccatcattgacggggtgatcatcggcagaataaacaccgccagcatcgccagcgccacctgaatgacgatctgcgggatagcgatggtcatcaccgcgtagcccagcagggttgcgaatatcccggcggtgaacagatcgaggatcgttttaatgtacaggatcgacggatcgccgctcataccttcggtcatggcgccgaaaataccggtaccgctggcgcaaaacagcaccaggatagcgacgaatttttcggtgaactcttcatgacctaacccctgaacgggcggcagaactttattaatcaagccgcgtgttgaacccgccgcgctgccgatgcgtttttccaggtgcagcagttcgccgaggaaagcgccgagtaccattgccagcactaccgccggcatatatttcaccttcagtaccagggtgatgcccaggccaacggaacagagaccaaaggtcatcggtagcgcggttttgacgcgttccggaagtttgcctccggccattgcgccgatcaatccgccgataatcacggcggaaccatttacatatggaccaattaacattgcgagttcctgttacgcgtaatgcagcgcgccttcaccccagcgcgggatgttattgacctcaaggtcaaagaggtcgagcgcgcggttcacgctatgggtaataatgtcatctgcgctttgcgggcgttgatagagcgccggaaccggtggaaagatgatgccgcccatttcgctaaccgccgccatattgcgtatatggccgaggttgagcggggtctcgcgtgctaacaacaccagccggcggcgttccttcagcaccacgtccgccgcgcgggtgagcagattatcggtgagacagtgggcgatagcgcccaatgaccgcatcgagcagggggcgactaacatccccagcgttttaaacgatccgctggagatagatgcgcccaggtggttaattgggtgtaccacgtcagccagcgccatcacttcgtctaagcggtagtccgtttccagctcgcaggtcttttccgcgcctttggagaccacaaggtgcacttctaccgctagcggctgcagaagctccagcgctttgacgccgtactggaatccggacgcgccgctaatgccaatgatgatgcgtggtgtcatggtatttgcccttattcgaaatccggcaggaaacgttttacatcaaccgctttgaacttagagcgctcaaagttgtgcttcagatggaacggtacggtgcagtcgaaaatggttttacacgacattccctgctgcagaatgctggggctgtattccggcacctgcgacggatcgagcggatggcagcgtacgccagggatcaccacggtatcgacatcgccctgataacgggtttgcatcgcccatagcacgtcgtcgctatcgaaaatatcaacatcttcatctaccagaataacgtgtttgagttccgggaaggcggagaacgccagcagtgcagcctggcgctggcggccttcatcggctggagatgattttttgaattgcagcaccgcgagcagcttgccgccgcccgccgagtgggcgaagacgttgagtaatttgcccggcatggcgcgttctaccatgtcgagaatactggcttcggtcgggatcccggccatgttgacatgttcttcgcctggcccgacggtggtgcgccagatggggttgatacgatgagtaaccgctttgactttaataaccggaatcgcctctttggcttcgccggtatagccagggaactccggcatggcgcggccggtattggtgttttgatcttcacgcacgcgtacgttcggcagcagttcgccttcgataacgatttcagcgtgggcgatggctttttcattaatggttttacactgcaccatctccaccggatggccgcgcagcgcgccggcgatacttagctcatcaaagcccagcggggtggtcggcggttcaaagcaggcggcgatttcgatagccgggtccacgccgatactaatcgagatcggcagaggctgtcccgccgcctccgccttcatgcggaaggcatcgatatggcggcccggcgtcagccacattgagagttcatcgcggctctgtacgcacagacgatgaatggtgatatcggattcaccggtttgcgggtcggaggcatagcacaggcccatggtgatatacgggccagcgtcttcttcggtgttggttggcgcaggcagcagtttgcgtagatcgaaatcatcatcgctggcgagatgaaccacttcctggcataccgccgagtcctgcaccatggtcggggaaatggcattttcaacggagtctttcaacaggtggcccagtttcgccggttcacactgcaggaactggctgacgcgctggcgtgaaccgttcagaccgatggctacgctgatgtcgttgaagcccttaatgttgttaaataccatcaccgggccgttcttacgcgtcggacgctggcaggtaccgccggcgcccacgtagcgataaacgccggagagctcggcgtggggatcgacttcagtatcggtttcaacatactcgccaggtagcgtttttaatagcgccagggcagagcgtaaatcatgcaccgatgacggcgcttttttatctgagtgtgccatgagggttcctttgggaaagcaatttcgctaaccgcacaatatttttgttcgactaattaaacaaataccgtttaccggatggtcagtagatcaaaaaggtttaatttaaaaagctgttaagaaatgattaattaaaatagaggagttggcgcggctttttatttgataccattagtgcaatactgacctgcagataaagagggttagataatggatctgaaacgcttacgctatttttgccgggtggtagaacatggctcggttagccaggcggcgaaatcgctcaacatggcgcagccgccgctcagtaagcggatacaggagctggaagaagagctgcaggtgtcgctttttgaacgccgcggcaaccgtattgaaccaacggaagcaggctattttctttaccgtaagggttgtgaaatattacgccaggtggaagataccgccagggaaacggccgatattgcgcaaaagacccgtgcggaagtgcgcgttggcttaactcatctttatcaaaactattttcagcctttattaatggagctctatcggcgaaatccagaaacggcaataaatatctcggtgaccgattcaagccatctggaaacgttattaaatgaaggcgctatcgacctggccttaatacagcggccctaccgtagtgagggtttcgattatgtctctttcgatccgataaaattggtagccgtcattaataaaaaatgtttgccgcagccgccgtctaaccccttcgattataacgcgctggcgaagatgccgttggtgctgcttcaccgggcgaaagattccggcacctatgagatgctgatggagctgtttcgtaaatccggcgtcagtgcgaaggtgattatgcatattacccaaccaggggtgatcctcgactggctggagggagggctggaagctgcgacattgttgccatcctcggaagtgaatgctgaaaaactgcctcattgctatgtggttgatgtattcccctcgccacagatattttatccggcgctggtgaaattaccgtcgatgtcgtatctcccggcgctgatggatattatcgccggaggctatccatttaacgcgccgaagggagtagaggtcgtagaataagcgtagaacattggggatcgtccctcgggctggtatgatattcgcccatgatgccgagatgagaaaccgttgagtgcaggacgcctgatgaaaacacgcttttatatcgcgataatgctgcttgctagcctgactttagccggctgttccagtacttccgattctgggtccacctataccgtgaaacgcggcgatacgctgtatgcgatctcccgtagcaccggcaccagcgtacgcgatctggcgcgcctgaataacatctctccgccatacactattgaagtcggacagaagctgaaacttaacggcggttcgaaagcaaaaagcagcaccgccgggaaaaaatcctccagtacccgcacagccgccgtgacgccatcatcggcggtgccgcagtcctcatggccgccggtggggcagcgctgctggcgctggccgaccagcggtaaagttgtgatgccgtactccacccgcgatggcggcaataaaggtatcgatattgccggtacccgcggccagccggtttacgccgccggcgccggtaaggtggtctacgtcggcaaccagctgcgcggttacggcaacctgatcatgattaagcataacgaggattacatcaccgcgtatgcgcataacgataagatgatggttaataacggccagagcgtgaagattggccagcagattgcaaccatgggtagtacggacgctgattccgtacggctgcatttccagattcgctatcgcgccacggccatcgacccgctgcgttatctgccgccgcaaggcagtaaacctaagtgctaaaaggttattttatcagcagttagcccaatccgggcttgccacagggtgcgtaaggtctataatgcttttcgcacctcttcgcgggcgtagttcaatggtagaacgagagcttcccaagctctatacgagggttcgattcccttcgcccgctccacaatttctcttgtagtcacacatgttttgtaacttgctgtttttgaaacaggttactgaccccgtatatataagcaatctctcgtagtaccactcaaaaatacactgttagttttcacgtgaagttaacggttagatgaaagttaaacttaacgttggctgcagttccagagtcataccgcgatagtacaacgtgaacaaaagcctaactgggtttagctgattactggttactgctggtttatgggataagtaagtggtcctactatcagagatcggggcgcatggggatgtacaggggcgtagatatgttgcaggatgtcccttcgctttaccagaaaatcgtaacagggaagggacgttaaacatgaagaacaaaatgttgctgggtgttgtatttctcttaacgggatgtccggggcctggcgatcgaatggtagatcgtgaatctacaacggcattaatcaaagataatcaagtttgtgtggtgtcaccactggagccacaggaacggatcactgctatccaaatcaatagcgataatagcgactctcttcacaagattttggatgacaagcctgtttatataccgaagggtgactgtcttcctgtattcggatttaagtttacatctggaaagaggtataacttcgcgtatgacgtccaatctgataaatcagggtcacatttagtcactgctgaattttattatcccaaagaataagggggcaaaccgcccccctctgtttcacttcaacgcacgtatgtaatcaagcaaggctttcagttggctacctttcatcgccggaacacgaatacgtatatcagcctttcctgtactggcgtacctgctttccccttgcagtaatcgaaggctcattgttatgatctgatggtctggcattcctaacactccgtggtggtttgttgtttgtcggagcgctgtgtgggatgttctcagcatcctgcacagcactattaccgcattatgtaaaatccggggtaacaagtggcgctgtattgtcgtccctgcaaacttcactaacggggcgttatggcttctattgtctgaaatctgatacattgcataaacatcatgtggattgctggaaagttcatcactatgattatgtgtgccattgccagttaagaaatgcggagaggacaatatggatgttactgatgaggctttgttgagttctggctttacaccatcggatttgaagaagataaagaacaacgttgaaagctatggtggaacgttggggaatgcaatcagggacctggccaggcgatttattcttgccgtgtgggttgtatccggttgccttgctgtattcatttttcttgtgatgttcgcatctgagcagagtgttttctctggtgctattggcctttcttgtggcgcagcggttgcaatttttatacaaccgcctgtacttgcttataaatcttggcgattctgtagagtgaacaaatcttaattagtactgttatcagtagccagaagatcaaaaatgactttcgctttgacaccatatccagcgattttcatcgttagcttaggcttgctcattgtgtcaacttttcggtagtaatcacgcggcagccaacggaataatcgccaagctccgggtttccttgctaagccgaagatactatagacactcgcccctagagtcaccgtattataaagagctaatccactttttgggctaaaccccataaattgtgcggtctccattgcgccatcagcaaaaattccttccgattttgattgttcaccatagcgaagatggcttgcttcttttgttataccgttaataccatcaacaaataaaactgctcctgcaagaactccaataggggtcatagtggacatcataaccatcccaccaaataatgctgctccagataccactatatggattgccgaaatcacgtatccgacgattttattgttttccctgacaaactcgacctttgcataaagttgggcggctctggttcttaacaggcgttcttgttcttgcaaattatctgtttcagcacgaagatttttgatgcatacaatacattcttcatcggttttagctcgtcgtgctgtttcaaattctttatctacaacctgttttatctcttcgacaaacttgattcgtgtaagaccatcttgcaaatagaatgctgacagccggtttgctgtttcgacgagtttccgggcttcaagattcaccatggtatctgaccatgttctgttccagcccctgttgagcagcgcaatatccattaaagactccttcccaaaatgtgtttggtcatattacgtgcagtaaggtcgaagacaacaggaaatgctttcccaacgtctgattttagcggaacgaacacataatcaaactcggagactccacatggtaattctctatttttcattgtccgacgtttcaaacgtcctggagtacgggcaggactgcgagcgcgtcccagcgtaataagcaatgtcccatcaagcggaagctagtacaggctgcgtttaatacgcagaccgaagagttttactttaacgctgacgattctgttatgtcgttccgtgaagggaaagaggcgaacggaattggccgtaagacccacacctgccgcgagttcctgatttgtgatgattccaccctgaaaagaatctgccggggcatgggccaactggaagcgatgcgccatgctggctttgccagactgggtgacagcccggaatttcgccagttgtggtgcggggagcctaagtctgttgatgacaatttcaacacgaagaatctgctaaagcttggtgctggctctatgaccgatcatccgtggcgattcagagagatacatcaggtcatccttaacccgacgcatatccagaaggtgattaatctgcgaagtgattcattacgcaggcaaagcggggtgaaaagttatcgccaataagaaccgtttcctcattcagccgctttaacatatacagcttgtcggcatgttcgtaagcgtcgaagaagaggtaatcgacagcgtccgttgcattatcatcgggggatttttcgcgtccctcgggggtgagcatgaaaacgccggcagtatgtccaagcggacgagcataccgaaagaacaattttcggtttacagcaaactcgtcgtcatcgcttttgagctttccttgcactgataatgaaaggtgcccggagttgtagctggtaatcagcatgattccgtggagttcctttttggtattctggatgtcgagtatcgacgtgaattccgaggagcaggaaaaactgatttcttgttttttagcattcccagtgataatcaaataagcgatagcggccagcccaataatgacaattacgactgaccagagtaaaaaagagtgatcgctttcctgcttcatatcattcctcatgatggcgatactggctgatgcaatggtaatagccgaggttgaggccgcattcagcggcaaacgaccaatcaaccaggttatggttgctcgcccaggtattaagatacaggtctttagggtgcgagcagttggggctaatccccacggacttgaaaatatccagcgccttcttttcggttatcgtgtctgtgagggcattccctaatatatgtacacggcattgctcgtagtcgatggttcgcaagatagccgcgtccgtcatggctatatgattgggtatccatgttaaccatgctgttgccagcacggcgatgctggtaattaacgctgtgatagcgacaggccaccggtttggtttctttctcctcggcgtcgatgcaacataggcaactctggcggccgtttgcgcttcttcctgtagctgaatattgatattgacgtcgcccatccgaaatccaatacgaggaatggtaacgatgagttctgcaggatgacctgtcgacgtaatggctttgcgcaaaaatgaaatgtgctggttaagattcgcatccgtcgctctggcgccattatgctggaaaacattcagcagaatttcatcgcgcgaggatatctctttaccattttgcaacaaatagagcagtaattgtgtggccacgttattcaatgtggctatttcaccagatgccacgtcttttagggtatttttaagtggtctgaaaactaaaccatcaccaataattacggatttaattttgtttattggtatatgagaaatcactgatgtctcctttaaagcaggatatctcgcattcgagtggggaagcaacagcataacataattcatttataaaaagaggttgtgccatagatcgctttattatcatttacataacaatattttaatattctttatgtaatcattcattctccttcctttctttcactatcttattgtcagcactcacttttggtatccctttcaatttttaaaaatattttataaatatattttgccagttatctgttctaaattaaaaaatagttgatagttaaaaactctataaaaactataaataatagacattaacactgctgcttgggtgttttttggctaatttttaggtaaatgatcgatctgcaggcgggaaagcaacacgatttcctgagtttgattgattccgtattttggcattgtgtcaatttttcgtcgacttaatataagccccgaaacagcgtaaacgactgtggacggtatttctgatggaatgccaatgaagttcaaaatacggtgcggtttgagatggattgtttgcaaggatatgcgctgccgccccgcgagatcgggttttcccggacaggaattgtctgcggaaatagatcgtcgaaataaccaaaacacagatataaggttaagtagtaatatgaaaatgaaaaacgtggctgtggcctgtgcgctgatggcgggaatgacttttactgcctcttctgctttcgctgcaaaaaatgtcgaaccgactaacggtaaaatccacttcaccggttctctcgttaattccgcatgtggtctggctccagaatccagcccggtgcaggtgaattttggcgagatcccaacttctcagttaaaagacaaccaacgtgctggcgttaaacatgccaaaatcgttctgcagggttgcgatacgactgtcgcaaaaaccgctaccgtgacttataccccggcaacgattgatgcagacaacaacgcgctagccgccttcacctctggtaccgccaagggcgcaggcatcggtatggttgacagcggcaaccaggatgttgagtggggtaaagccgcctctcaggtcaatattaccgatggcgaaaccgacattgatttcgtcgcttacctgcaggcaaacaacgcatctgcagcggtaactccgggtgatttcgaatctaccgttaatttccagatcgattatcagtaacgatctgcagcgggcgcattatcgcgcctgcttaacccttcctgcgaataactgaaaggaaatgcggttatgcctggatggcgtattttactgctttttatcttcatatcgcctgcatgggtttcggctgacactcaccgtcttgtcagtacgcccggaaaaatgcgtatgcggggaaatattattgaggctgcttgttatgtcgatccgcgcgaccggtcactactggttgaatttgatgacctctcagccagagatatttccgggaaacctgaaaaagtatctgcgcatgatttcagcattcatttgctgggatgctcactaggggattctcaacacccaggcaatttgtttcaacgcgccaatattactttttccggcgcccccgatagtgacaatccagattatctgagcgtgcaatcggaaactgaaaatttagcgatagaaatatacgacagcaaaggacagcaaattcacttgggcgaaccatcaccggactatgtacttaacccaggaaaaaatacgctcaaatttacggcttatttgatctcccgcgacggaagaatgacatctggcgaatttactgcggtcacgcattttgttgtgaattatctctgagctgcactgcaattcgggtatctgaaggttgcgaacaaaaatgatcacgctgaaaacagataaaaaacgtctggcgctatttattgctctggtctgcgccgcttcatgggctgaagcggatgaggccattgaatttaataccgacgtactggatgccagcgacaggcataatgtcgatttacagcgtttttccgaaggcaactttgtggctcccggagaatatctgctggatgttcgtattaacagccaggagattcctcaacagtcaatccgttatatcgccgatcctgccaactcacataaatctatggcgtgtctgacggcgcaacaactcgagttactggcgctcaaagaagaggcgttgacccatattcatcccattagcgcaacctgctatgacatatcccgcctgccgggtgtggcgctgaataatagcgcaggcgtactggacattaccgtacctcaggcatggatgaaatataccgacccagactggacgccgcctgagcgctgggataacggcgtcgccgggctgatttttgactacagcatctcaggacaggccacgcattacgaacagggtggcgatcattatcgctctctgtccggctatgggcagacaggttttaacctcggcgcatggcgttttcgtggccagtatcaggccaattacgcttcagatggtaatcatgggcgtatcgactgggatcagatctatgcttatcgcccgttaccgatgcaggcagcaaaactgacggtcggcgaaatctatctgaattctcaggtttttgattcggtgcgcttcaccggggtcaaccttgccagcgacgagcgtatgctgccgccaaatttgcagggctacgcgcctgaagtgcacggcatcgcccgcagtaatgcgaaggtcaccgtcagtcagcagggccgtgttatctatcaaaccaccgttcctgcggggccgtttaatattcaggatctgcacggttcggtacgcggtacgttggatgtgcgcgtcgaagagcaggatggcagcgtacaaactttccaggtcaatacggctgatatcccttatttgacgcgtccgggctatgttcgctacaacgccgcggtcggtaagccgtcgcgttataaccacgacgttcagggccctgcgttttatagcggcgatttttcctggggggtgagcaatgcatggtcactttacggcggcgcgttgctcaccggcgagcgctacaacgcctggtcgatggggattggacgggatttaagctggctgggagcgctgtcggccgatgcgacgcaatccgtgagtcgggtgaagcatcaggctgaacaaaaaggcatgtcctttaagctcagctatgccaaaacctttgatgagtacaacagcgcgattacctttgccggataccgcttttcacagcgtaatttccgtaccttctcgcagtttctcgacgagcagtatgaaagtaacaacagcgccggcaacgaaaaagagatgtacaccgttaccggcaacaaaaccttttttgctgacgatccgcatttagcgaccacgctctacctcacctatacccaccagaactattgggatcgcggttcccaggatcgttacgggttatcgatgggacacagtttttcctttgcgggtatccaggggatcagcgccaacctcgcggcttatcgctctgagtatcagggcaagcgggacgacagtctctcgctttcaatttcagtgccatggggtgatggtcgctctatggattatgaattacagaacagcggtaaccaaaccagtcaaatggtttcgtattccgataaccgcgatcgtaacaatccgtggcgtttgcgcgcaggggtttccggtgaagggcatacggcatttgatggctattaccagcatcgcagcatgatggcggaactggaatctaacgtcagctggcagcaatcacgctatttctccgttggcggcacggtacgcggcggctttacggcgacgcgtcacggcgcggcgctgcataacagtcaggcgtcaatgaataccgccagagtgatggttgataccgatggcgttgccaatgtgccgcttaacggtgaacaggcgcattcaaatcgtttcggtattgctgttgtaccggacgtcgtcagttatcacagctttgatacccgtatcgatgtggacgccatggacgaggacatttccgcgaccaaagcgatcgtgactaacaccctgacggaaggcgctattggctaccagcgctttgccgtcgcgcaggggcaaaaaatgatggcgctgctgcgcctgaaggatggctcggtgccgccgtttggcgccgaagtgtttaacgccaacggcgtcagcgtcgccatggtgatggaaaacggcatggcctggattgcgggggtgaatccgtccgagcgtctttccgttgcctgggctggccgtgcgcagtgtcacttacaggtgccacaacaaatcaacccggaaggtaacgtgctgttgccttgtgaataatttcaataacctgaatgaattttgtcatgaataatcaatctcttaaattcgcgcgccgttggcttaaacccgtggcctgtggcctgttttttattgcgcagatcaatgcttcatgggcgggtattgcgctcgaccgtacccgcatgatcatcaccggtgatgcacgctcagtaagtgcgaatttaaccaacaccagcccgagcattccatttctggctcagtcgtgggtagaggacgcccacggaacaaaaattacctcgccattaatggtcttaccgccgctgcaacggattaatggtgggcagaagggaatcgcccgcgtgacgaaaaccagcggaattaacgcgttgccacaggatcgcgagagtctgttctacctgaacgtgcgtgaaatcccgccaaaaccggataagccgaacgtgctgcagttggcgatgcagtcgcgaatcaaattgttctatcggccgacagctatcgtgccggaaacgccggggccgtgtggcaaaaccaactgatctttcacaagcagggtcagcgctggaccgtggataacccaacgccatacttcgttaccttaatcggcttaagccgcaaacctgaagcccagggtggcggcagactgactgatttcccggggattatgatctcgccaaagtcctctctcgatttcaacgtctcggacgccagcgtcagccagttcagcatgatgtacgttaacgattttggcggtcaccctgaattgaaattcagctgcacaggcaatgtgtgtaaagcattgccgatggagcaacagccccggtaaaggactcgtaaatgaaaaagatgctttgcgctctgctgatggcaggcatgacctgctcggttcaggccacaagcggccgccatgatatgagcaacgtttccggcgagtatggcaacgtccgctttcatgggcgggtattcgtttcgccgtgcgtgctggatatggcttcacgcgatcagaccatcgatctcggcgatatttccgccagccgctttcgccagagcggcgatcgcagcgatccggtattggtgacgctgcatctgaatggctgcttaaaaggctccggccacacgttaaaggacttccctgggcagaccagcgagctccctgagctgtcgcacagtacggtggagcgtggcgtttcgatgacgctgatggccgaaagcgcgccggaaaacagcgatcttgggcggattcgtggcgatgtgcgcggcgcgggcattcggctactgaccgaacgtaaccagttgatccacctgaatcaaccgcaacgcatgtggatcctcaagccgggcgataacgcgattcactttcttgccgcgctggaatcttttgggcaggaggtgaccgctggcgaatttaacggtctggtcagacttaagctggagtatctatgagcgtattgcacaaagcactgctgtgggtcgccctggcgggctgtccgctggccggcaggcatttaccctcggtgagggagaaccacagggcggatcgccgcatcagtacgatattgaactgaactcactggatgtcagcaaaaaccacgagggcggcagaacggatccgttcacctggaatttggggagttggtatgtcgtggactttcattgtgagcaggccgacatctcgcgacagccgatttactacaccaccacgaccaccatgccgccttctaatcagggagcgaaccgttttcgtctgaatgagtacctggatgtggaagtccaggtatgggtcgccgggcggtataacaactacgtccaggcgccgttcaccaacttttcgaatcgctacaacgaccataactgcaaaaagcgcaaaggctacgagcgagccactaacattgaaagtggctctaaagggaaagtgacgtttattgtcactaaacccattattaacggcatcaatatcacgtctcagtcgctggtggaggttgctggacgtctgggcagcgctggccctacgccgacaacgccaatttcccgtgtggtcattaaatccgggctcattaccgtgccggacaaatgcatctttaatcgcggagacaaaatcagcattgaatttggcgatctgccaggctccgccgcccggctcaacggcaccaactacagcaagtcgatccccattcatgtggtctgcgaggggggagcttcgatcagggcgcgttgaacattaatcttggcgtacaaactaccacggcgtcaggcacggcgggatttaacgatcatctcctcggcacgctgagcggcggccaaaaacgcgacgaccttggcattgtgattaaagacgcgagcggcggaaccgtcgtgcccaatcaattctacaacgtgaagggtttttaccagaaccagggcgactggaatcttaccgccgcgccggtggcaaaaccgggcgtgggaagcgttaaagaaggtgagtttgaagcttctgccaccgttgtcgcgcagtttcagtagggggatgccatgagatttacggcgttaatcgcgaccagcgcgctactgcttggaggtatggcacaggccgacactaagctggtcggcggtgatatgtactttcacggcaccattcgagcgctggcctgcagtcttgcgccaggaggcgataaaatcgaggtcgatttcgggcaaatcgcgacccaggatctctatctctcggggcgcagtaagccaaaaaaattcagcattgagttacgcgactgcaacccggaggtgtttcgcgggatctcggtcactttcagcggcagtgaggatgccgagttggcggatcatctggcgctggatagcagtgaacaaggcgcctccggaatcggcattggaatgagcgaagaggatggtacggcaatccgccttgatgaaagcacgtcagtcaaagagatcactgaaggatcgatgactttgaactttttggcatgggtcgcggcggaaccgtcggcgataaaaaatcagactctcgaatacggctccttcagcgccagcgggacctggacgctgaactaccagtagcatgatgaacgcattgcatcgtattgcgccgctgccggcgcagaaattattgctcgttgtcagtctgtttttctgggacggggcaatgcatctctactggccgaataacggcggtagcggtttgtcgttgccgctgaatatcacggcctggatttatgccgttgtgctgacagctagcgcatcaatgctggtacctcgtcaacgctggcggataactatacccgccgcgggatttacgatgggcgcgctcattctgacgttgctttgtctactgacgcctgaggtttggcggtccgaggcgctactggtcgcggggacgttgctgggaggcgtgctcgtctatttggcgacgttgcaaattccacttacgacaaacgcgctgacagtgctgctggctctactctggggcgcgtgcgtcctcgaatgtctggcgtttacctatcaatactggcattggcccggggtgaattactgggagttcgcctggcggcgcggtacgcgcccctacggtatttttcagcaggttaatctgatggccagtttcaccgcgtgtggcgtgctgctgtcagcgttgctctttttacggctacgtggcggatatcgaattattatcggggttgctctggtgataatgggatttgtattgcatgagtctcagtcgcaaaccggttacctgtctgtggcggtaggcgaggccttgctgctggcggtttttcctgcgcagcgccgtacgctactgttactcctgctgccgctggcgataggcatgattgcaggcgcgcttgctcgccattttttgtcggtggtaacggttaatcacctgacgacctcccaggtgcgctggacggtgttgaaagcatcgctggcattatttgccgaacgtccgtgggcaggatggggcgtgggcagtttcgccgccgtgtttctcgaacgcgcggggtcgttggggctaagcagcatctcgcatccgcataacgaactggcgctgtggctggtggagggagggctggttgggctggtaggagcgctttgttttatggcgagtggtttatggctctggttgtacggcaatcgctggcatcgcgcctgtctggtggcggcgctacccgtcgttatccatatgttgacggaataccccgtcaggcagtcaacgccacactggctactgctgattttgttgcttcgttgcgcagactgcaggcgaaaaggggggcggttgccgttcaccctggcgtcgctgttgcgcgctatggcattgatcgcggttattgtcatcactccattgttgtttctcacgctgcatacgcaacaacaactgacgctggcggagcgccaatcaacacagtggcgtctggccgaatctcttcctgtaggaggctggctgcttgccacccgctaccggtttgatgtccagatggggtatctacaacgatatcaacgtacccgggacgctcgttggctggcagccgttcgccgctgggcgcctgactatgtgcgtgttcaaccggacccgaatgtctccttcacgcagatcttgctggcgttacagcagcgagacctggccgaggcgcatcgtctggcgacgcgcttttgtctgttatacccgaatgataggcgtactctatggctgcaggatgcgcgacgtccttttaatcaaataatagagtgagataagcaaatcctcttatcgaccagcgtccatcactgagacagaacgacctgcgcgagccgatcggtgatgttatcaagcgtgcaaatcttaatacgatggtcccgtgaatcagagaggataaccgtttctccgtcgccttcgatttcaagaataaatcgcgcccccaggcgtctggaatttttatagcgggtgctgattcgttgggggagcagtcgttgatgatgcttaaatagggaaattgctgacgcaggctacgtccgagcagcactgcctgggcagccacacgaggctggcctgcaataatcacaatgtcggtcggcggatgcgctctggcggggtggggacgatagccgagcagagtgacaatcggctccatcatgaatgcaaaaccacaggcggaaaccggtttttcagcaatacggctggcgcaggcgtcgtatcggccgccacggctgatgattaactcgcgctctatagcgatgctgcgccattcaaagaccaactgacaatagtcattggcgggaaacagcgcaggatcgtattgccaggcaataccggcttgggtcagggcgtgctgaaggcgctggaaccgatgacgggagtcaacggtaataaaatccgccaggcagggcgccgctggagcaagacgctgaagaaggatatcctcatgatggatcaaccactccggatgtttctccagccagtgctgctgctccgggttcagcaaatgtgcgatgggctgatagtaatcgcgcaacgcccggcggaaagccgccagcgaggactcgtcacccagcatattaatatgcagttccgccatttcaccgaggccaatacgcctgaagaaaaccgcctgcataaccagatgctcaagttcgatatcaacgcccggcatgccgaatgcttcgacgccaatttgatgattttgccggatatctccatccagggagcgttgacggaacatggcgcccgaataccaaatccggctcattactgcggtatgcggattgtctgccatcaggcgtagacatccggttgtcccatcgccacgtaattttcccttgtcggccatcaccgggccgcctggggcgaatagcgatgtatgttcaagtaagggtaacctgatttgttgatagccatgctgacgcagaaactgttcagcctgaagttccagccaggtccactgttctgatggggaggattcatatttacgcgggcggccgcaatgtcgtgcccgcagcggcctttccatctgggcttcaagttgctggctcaacgctggcgaggcgagcaggcaattttgcgccagcgcatggcgaatccgggtcaccagcgcccgatttaccggttgccggcagaattcctggaagtgggcctgtcgctgttgctcattctcaccgagcttgagccagacaggatggggaactatcaaacctgaaggcagattaccgtgactatggcagcccgggctcccgtcctcgtcacattcaataaagcgcttcacggccaggaaataggtttcaggttccagggggctgcataagtagcggctgtcccacaatgcgccatgccgttggtaacgacgattgtaataaggtacatagctgcgtccgatatgctgaataaaacggctcagcgcctgtttatccggagcgctgaccagcagcaggatacgtgggacggcaagtgaccaactatgaatagacacggcgtaacgttgcgccgcgtcttgcatacaccgttcgaaggcagagtaatcttcctcgtggcggaacaacgcttcgccattatgcccgcgaagctgcgtcagatgcggcatccccggaataaataatctgttttttctcggcatgtccacgattctctgcttaaggatctcgctgtttgtcagggtgaaatgctgaagggggattagcgccgggacgagtaccgtcctgccgcacggtacccaatctggacgtgtttactggcagtgctgttgcagccagtcaatgagcgctttctcttcgagcgacatttgacgggagctggcgaggtcccacagccgtatctcattgtcggtattcagcgtgattatcgcgcgacactgactttgcagggcggtctgatgctggcgtttaagtttgttgccgctgcaatccaccatcacgcttaacttttcaatacgctggcgcagtagctccgccagcatctgggcccgtaagccatcatcctgacattcactggtaatgaccacgtcagggtgaaaatgccacaacggattatctttctggctgacggtctgaatgagtaacaacaggcgttcgataccgatggcaaaaccgcaggctggcaacgccttcggattgaataactccgccagaccgtcgtagcggccaccaccgcagacagtaccctgcgagcccagttcgtcagtcacccactcaaacacggtgcgggtgtagtaatccagcccgcgcaccagacgcggattgatggtataggggatgtcggccttatcgagcagttcgcagagtagcgaaaaatggtgacgggagtcttcgaacaggtaatccagcaatcgcggcgcctgttccagcatgggctgcatggttggatttttgctgtcgaggatgcgcaatgggttggtttccagccgtttgaggctatcttcatccagttgctcacgatgagcattaaaccagtcaacaagggcggttttatgggcccgccgttcatccggcgtgcccagggagttaatttccagcctgacatgcgggtcaggcccagctcctggaacaaatcacggaccataaaaatcatttcagcatcgacgtccggcccggccatgccgaaggcttcagcaccgaactgcgtgaattgacgcagccgtcccttctgtgggcgttcatagcgaaacattgggccctgataccacaggcgctgggttttgttgtaacacagattattttccagcaccgcacgcatgcagccgctggttccctcgggacgcagcgtaatctgttcgccgcttttatccgtaaagttgtacatttctttggcaacgatatctgtggcttcgccaacagcacgttcgaataaggcgaccggttccagcagaggtaagcggatctcctggtagccataacggtaggtcagacgacggaatttattttcaagccactgccagattggcgtttcggcgggcagtacgtcgcgcataccacgtatggcttttaactttgcactcatcgtttatgactcctgatgcgaaattcccatatactgtgcaggtctggcgggttccggttggcgctgcaacccaccagattgtccagcgggcagcggcagtttgccgctgctcactcttatgccgcccgttgcgccaggtcggcgattacgtcatcgatcagcgcatcaatccgggaactgtccaggtggtgagcggtggtgatcagatgcgcgacgttgccggacgttgccaggcagtgtttcttccatacccattcagaaggcttcggaaagaccaccgtgatggagtttttgtggcacagcgcgtcaatacctgctgctttaaagcgatccacggcgtatttcgccatgttgagactgtgaccaatgcggcgatgccattcggcatcggtatggctgcgaacggcggcccacatcatcaaaggggtatgaccgttgcgtgaccctgaaatcgttttatcgtgggcggagatgtagtcgatctctacgctgatacggtcgacgttggctttcttggctaccacaatgccgcatggaatcggggaaccgatcattttgtgtccggaaacgccaatcgaatcgataccatccgcgaaggtaaacggttgtgggtcctccacgaagggcaagatcatgccgcttagcgcggcatccgcatgcagataataatcttcacgtgggatccccagcgcagcgatacgcttctgtatctcagcgatattatcaacagcgccgcgtaccgttgtgccaatattggcgaaaatgatgggatggcgttcgcctgaggtcctgattttattgatcaaatcgtcataatccatttctccgtctggctgagattccaccagttgcgatttgatacgcagcagtttgacgattttggcgacggaatagtgagtatcttttgaatagtagagcgtgccttccgggaacagctctcttcccagatagcatccaaacatattactttctgtgccgccgttggtgacataaccccagctttccgcaaaggggattttgaatatgccggagaaatactccatgacttctttttcaaagtcgaaagagttgagtaaatagttacaatactcccccagtcaccacagttattaattgagaaacgcaggaagcgctccagcatggtgtaatcaaaatcagcagattcaggatagccaatattaaaatagcgattttttacacagtatgaccaaaatgcatcaagtttattttgatcggcaatagataaagacatatgaatctccatatttatgttggtgaataaagtattatttttgaaggtaaagaatatcctggccttttttattacgtccggccgcgacaaaagaaaacagaggaatggttaccatcatcataatcgtgccccagaaaatggaatcggtacccgaaccgagtagggcaaatatactgtaaatcataccgatgacagtcaggacacaataaaacataaaaccacgtccacggttgagctttttagaaaccatgatgataggtagcgcgataatggcgtacatataaggcagcagggaggcaaataccgacatcagaatcaccacctggaactgtttggcgagatcgggggaagccgtcagtaacagcaccagactcatcagcacgccagaaataatcagacctttcatcgggacatcatttttattggtctcggcgaaaacctgcggaaataacccctgtttcgccccggctcgcggcccctctgactgcaggatcaaccagccggaaatggagccaaaacaggcgataatactcagcgcggaggcgatgttgccggccatatcgccaaacatatagcgtgccgcatcggcgaatggggcggcagatttgaccagttcggcgtggggaaccaagcccatgataacggtacagctaccgacatagcataccgaggcaatcagcagaccatatacggtcgcgcgaggtaccgtgcgttctggattttccacctgtccgctggagaccacggcggattccactcctaagaaaccccacagcgcaatggaggccgcggagacgatcgctgagctgtcgctgttgcctgtcccgttgtaaacttcagagaacattttcgggtcaaaccagaaccagccgacaatgcccacacccagcacgacgaccagcatgcagctggcggtgaaggactgcgcgcgcccggccgttttagcccccaggctgcctaaggcaataaatgcccacagaatagcgatagcggtgatacaaccgtaaaccggattatgaagcgccgggaagaagtagctcagatagccgacccggcgacgaggagcgcgacgttgccaatccaggcgctaatccagtagcaaaccgtcgtttgaaaaccgatgaaagggccaaacgcatcgctggcataggccacgatccctcccgcgcgaggggtaatgaggctggttttagcgaaaaccaacgccaacgcaattacgccaataatagtaaacaaccatccccatagtgaaatatatcccactccggcgaggttggtcggcaacataaaaacaccggaacccatcatatttgatgcggtcacaagggttagtgccgttaaccccattttttgcgcagtacccgcgctgacgcttcccatatatatcccctctgtattaagtaaatgcttacttggttattaaacgcattttttcacagggcaggggtgggaatatgatctacatcattttttgaaaatgatgtgcgcgaatatatattaatttcggtatgttttttaaacagtgattaggtaattcactccgtccctttttatttaatcatcaaggttagtggtgattgcgcaataaataacggacgggctaatttttataggcgagcgctacaatggggggctgctgaattttcggatgcaaaaaataaggggcaaaagcccctttatctttacttcaacgtaccttgctattaagtttcaccgctcagttggtggtttactggatcggctagtacttttcgccatgctggcaaacacgccgtcgcggaatatccatgcgtgcactaatgccgcagagagatgtagcaacaccaccgcaaagagcagtttagctagcaggcgatgagcatcgtgaaaccaggcaaaaagcaccgggctggtcggggtaatggccggaaggttaagtccttcaaacataacaatcggaacgcccgcagccgacagctgcgcccagccaagcaatggcattgccagcatcagcgcgtatagcgcccagtgtgaagcttttgccgctagtacctgcaaccgtgagagctccgcaggaagatgtggcgaccgactataaaaccggttggccaggcgaatgagcgccagcagcaaaatagcgatccccaatggccggtgtacatccaccaaccaaatgcgatggtgtaatgaagtcatcatagcggcgccgatgaacagcatggtcaggatcatgattgccatcagccaatgcagatatctcgccagagggttgaaatgctgcggtgcacgcgcttgcttgtggtgattagagttcatttaacctcctgtttttgcacggcttcggttgctttgccgtagccaatttcccgctcgcgacggctccaggaatgtgaataggcgccagagcgcgcatttaagacgggatcgttagagacctctactccagcaggcacgatggagggatcaaagttaacgtcacggcaggcgccttcggcttgggcgacgagttgggtgactttgagcgtaccggcgacgatctgctggcgatcctttggccatggctgcgaagggtcatccaccgcgtcgccagattgggcgagttgcaataccaaatcccagtaaataggatgctgagaaagtcgctgctgtaattgttcgaacaggaagttatggtcggctttctgtcgctgttcatcagcgatagagacaaatggatcgtgcggccgcatcaaccagcgaacgggctgacgctggcggtcggcgttcacgagatagaatgcgttaatactataaaatgtcgccccggcaaagccgcctggcgctggcttttgcgccgcccactgcaagtatttactggcttccggatagtcctgtaaaaatgccgcgagacgctgcggatcgggcttaccggtagccgggtcgacggcggtggccttcttcatggcaagaaagccctccgggtttcgggtggcgaagtagggctcgttgttcattgccatgcgccactgctgtttatcgtccgttttcagtagcagcgccatgctcagggttttcgttgaattatcagccgcgtgtggattacctgcgccaatggagaatcgcccgacaacgggggtttccgactgtgaaaagagccgcgcggtggaataagaaacggctggagcggctggctcgaacgtcccgctaaaacagatccctttgccgtgcgcccggcgaaacccggcaggaaacggcttgtctggatcggggactaatgactggctggtggttcgcgaacccagccaaccagaggtccaggcgaatgccgctgccgttgccccgacgatgaccgcgatcgacgccagcgcgcgccaggtatttttggatcgaaaatccagttttgacatagacgtttccatcgttaagttttatttcacgtcacgcgtgatatatcgcacgcaacacgtttaatatcgtgagaatataggggtgttgatatcttattgttgcctttatatctttttgcgcttcaaaaatattgcttctggaaattattatttataataaaatcgttgtgatttagttggttatgtttttctttaaccgctttttaatttcttcattaagcatcatgataataattataattggtgcgcgaacgaaagaaacaatatcacgaaaagtttatacttctggtcagttaacctgataataaaaaatgtcattatctgcgctggttggccggcattaccaacccgattcagggtatagtgaaagccaaagtggtctcgggacacatagccttcagcgtgacgagggtaatgtgttgaacgatacatctatgcttgatggatttcactgaaaaatcaaagcgatgaacgataaaaaatggattaaagcagaagacgtggcgaaacttgccggcgtttcccgttcagccgtctcccgcgctttcacgcctggggcctcggtctcgccgaaaacccgcgccaaagtgcaggccgccgcggaaaccctgggctaccaggtcaatatcatcgcccgtacgatgaacaccggcagcagcaattttatcggcatcatcacttcggggttcgataatccttttcgcagtaaactgctggcgccgctgatccaccagctggcgctgcatggatttatgccattgttgatgaacgccgatgatccgcagcagttagctccttcgctaaaacatcttctcagctaccacgtcgcaggcgtgattatcacttccggcgcgccgccgctggagctggctgaggagtatcttgcgcgaaaaattcccgttacgcttatcaaccgtcatgctgaacttcccggctgcgaccgcgtcagcagcgataacgcgctcggcgggaaactggccgctgagctgttgcacgcaggccagtgccgggaagtcggttttattggcgaaaatcgtgacaatttcagcacccggctgcgctacgaggggtttattcaccatgccagcgggctggctgtcacggcgcatttctgcgaaacgggcggttatcagtccggttttgctgccgctcgccggctcgccgcggaaaggccaggattgcaggcgctgttttgcgccacggatatgctggcgattggggcgatggatgggctacgagcggataatccagcggccgtcctgccggcaattattggcttcgacgatattccccaggcggagtggcagccttatcaacttaccactatccagcaggacaccacgctgttggcttatcacgcggtggagatgctggttagccggatcgccaaattcaatcaaccttcacgtcaccgcgaagtcgctgtgaaattaataattcgtaatagcgccaaatgaaaaattcgttttatgatgaatcgatcacagaattatcgctaaaatccatccacactcactgcgctcttcggggcttttttaaataaaattgcacacgtgtgcaaaaggagtaaatgatgacaacactggattccgcggcgctacaggcccgctatcgcctggcctgcgagctggcgaaagcgggggccgagctggcgttcgaatactatcagcagcgcgaggcgctggcggtagagcataagggcaatgacctacaggacgtggtgagcgtggccgataaacgcgtagaagcctttgttaagcagcgtattactgacgcgtttgcggaggatggttttctcggcgaagagagcggtacgcagatgctggacgccagggtgctatgggtggttgatcccattgatggcaccagctgttttttgaatgggctgcatacctggtgcttgtcgctggcgatcgtcgttgacggcgagccggtggttggcgtcgtctacgatcccaaccatcgtgaactgttccacgcactacagggccatggtgcctggcttaatgagacgccaattcgcccacatcccgcagcaacggtcaaagaaggggtgatgggcgtcggaacgtcgcatcgggtgacgccggcgcaattcctgccttttcttgacgcgctgctcagcgatggcggcatgttcatccgcaatggctccggcgcgttgatgagcgcatgggcggccgccgggcgcctgattggctactacgaaccgcacatgaacccgtgggatgccttacccggtctggtgttgatgcgcgaagcggggggcgtcgccaacgactttctggcgcaagaggggattcgccatggtaacccctcctgctggccagccaaatgctgtatccccaactcaaaaatatgattcttcaaccattacattaacccttacaggttcgggctgtttctgattatgtaccctacacagtaacgataacgaccctcacggacgaagcacatcaatcagtcaagcctccgaccgtcggagaaactattatgtctggaattattcattttttccgggcgtcgccgccgcaagcgggcgccgcgtttgatgaaaaacgttttcgccgggtacgttggcaaacgtttattgctatgaccctggcctacgtgacgttctacgtctgccgcttatcgttcaccgtggcgaaaagcgcgctggtggaattaggcattaccccaacggagttgggaatgattggctcgacgctattctttagctacgccatcggcaaactggttaacggttttatcgccgatcatgccaacgtggtgcgttacatgagccttgggctattgctcagcgccgggatgaacctgctgatgggcatgaccaccaatgccatgctgctggctatcttttgggggattaacggctgggcgcagtcgatgggcgtcggtccttgtgcggtttcgctggcgcgctggtacggctttaaagagcggggaacgttttacgccatctggtcgacggcgcataacatcggcgaggccatgacctacatggtgatcgccgcggtgatcgcgggttttggctggcaaatgggctacctctccacggctgcgctcggcgccgctggtgtggtgctgttgctgctgtttatgcgcgattcgccacagagcagtggctttccctccattaacgtgattcgtgatgaaccgcaggaagagactgaagcgcgaggatcggtgttcaaaaaccaactgctggcattgcgtaacccggcgctgtggacgctggcgctggcatcggcatttatgtatatcgatcgttatgcggtgaactcgtgggggatcttctttctggaacaggataaagcctattccactcttgaggcttcaggcatcatcggcgttaacgcgatcgccggtatcgccgggaccatcatcgccggcatgctctctgaccgctttttcccgcgcaatcgcagcgtcatggccgggtttatcagcctgctgaacacggcaggtttcgccttaatgctctggtcgccgcataattactacaccgacatcctggcgatgatcgtcttcggcgcgaccatcggcgcgttaacctgtttcctcggagggttgatcgccgtcgatatctcttcacgcaaagcggcggggcagcgctgggaaccattggtattgccagctatgccggggcggggttgggcgaatttctgaccggaatcattatcgataaaaccgcgatcctcgaaaacgggaaaacgatttatgatttcagcacgctggcgttgttctggataggcaccggattgggttctgcgttactctgttttaccaccgccgccatcgtcgcccgacgccatgccgtcgaacggcagacttcattctcctcataactgattaattgataaggaagattttatgatgcctgcaagacatcagggccttttgcgcctgtttatcacctgtgcgctgccgctgttggcgatgcaatccgccgccgcggcgaactggcaactggaaaaagtggtggagttaagccgccacggcattcgtccgccaacgcccggcaatcgtgaagctattgaagccgcgacccagcgtccatggaccgaatggaccacccacgatggggagctgaccggacatggctatgcggcggtcgccaataaagggcgcgcggaagggcagcattatcgccagcttggcctgctgcaggggcagtgtccgagcgcggaggatatttatgttcgcgccagcccgctacagcgtacccgggcaaccgcacaggcgttagtagatggggcattccccggctgcggcgtggcgattcattatgtcagcggcgatgccgacccgctgttccagaccgacaagtttagcgcgacgcaaaccgaccccgtccgccagttggcggctgtgaaggcgaaagccggcgatctggctaagcgtcggcaggcgctggcgccgacgatccagttattaaaagccgcggtttgccaacaggataaaccgtgccccatttttgataagccctggcaggtggagcaaaaccaaagcggtaaaaccaccataagcgggctgagcgtgatggccaatatggttgaaacgctgcgtctgggctggagtgaaaacctgcccttaagccaattggcgtgggggaagattacccacgccagccagattacagccattctgccgctgttaacggcaaactacgatctcagtaatgacgtgctgtacaccgcgcaaaagcgcggctcggtgctgctcaacgcgatgctggacggagtgaaagcggacgccacgccgcacgtacgctggctgctgctggtggctcatgacaccaatatcgcgatggtgcgcacgctgatgaattttagttggcaactgcccggttacagccggggcaatattccgccgggcagcagtctggttatagagcgctggcgcaacagcaaaaatggcgaacgttatctgcacgtctatttccaggcgcaaagcctggaagacctgcgacgcctgcagatgccggatcaacagcacccgatgttgcaacaggagtggcgtcagcctgattgccagcagaccagcgtaggcacgttatgcccgtatcagtccgcgctggaggccttaagtaaacagatcgataaaagcgcgataccgccggtgaatatggttctttaattagcgcaaacgccataatccttagtggaaataggacggattatggcgtattgcttaaaagtgttagtgattcgagtaataattccagagatattggtttaatggacgcatggcactaatttactgagaggaaaaataagcaagcctcctctgagttttgttacgtctttatgtaatatgccttggttttttggagtttttaggaaaacatttaggtgcgctaagattgttcacaactcaggagttggttaccatttaacttctcaaggtaacgctatgtaatagcatagatattttctttaaataataggggggcattttaatacttcaattaataacgtattgaagagcttggtaatggtcatgtttattggtgggctaaatttagtaggtgtggtattggttttgttggattttatgccaccattttcttgggagtaagttaaagctaaaaaaggatttatgcaatggttgaatattattttggccatgatggcttccataatatctctccttttgatagaccagcaacatggggagggccaggtccagttgattttaattttcatgatctagcaaaacaattggactgttcgcggaatttcaatcgagttggtattatttattctaatggtgtgagccagtggttggtaagaccttcccggcggattgccaattcggtccaaagcatagcaagtcatgttattgtcacaaaggtttgcgatatctcacaagaaggttccacaaaagctattgttaagacacttcaggcaccatcactggccaccgaaattacatcaacggcactttcatgcggagcggctgcaatcacattagcccttactcttactggaacggcgatacttcccttacggcaggagcatcggtgctggtagccggagttattgctgccagcggcgtagctaccgttgggcaatgttttatcggtgcgggaagattatggacaataagtagaggtagggaagagcgtttagcatggcttgattcgcaggattggtatcttactacgactactatccttgatatcatttctcttgcaggtgccggggctgggttagcgaaatctatcgaagtgtggaaaacgatgaaaaaaatatcttcagcagaagctttatcatggctaagaggcctaagtagggttgagcgtaagcggcttacttatgaaatcattcgtaatgaaaatccgggaatatctaactctggtataaaagctgctatagaaatggggcattatcctaaacgatttccatctgaagtattacaacgaactctacaaagggagttgatgcaagtgattgttaattcatcagcatttgcagggagcggcatttccggaactgttagaaatccacacaatctaaaaaaaacaggacaatatgtgatagggataatacaatccttttcattaacataaaatctggttggcataatgattgagcatataaaaacagccttgtgttaaatgttgatgtggaaaaaaatcttgcgtcaatgagtccccgacaacttgagatggttaagcagcgattgaccgaatatgtaggaacaagagtcgggggacatacgctcagtattccaatggtgggcggaatactatttgctattttttgctttgttatgccgcaaattaccgtgtgggaaattattttcaggcttaatggatggcctgattatgctatactggctgcggcttttccctcgggagttttgtatagcatattgatttgtattccggcgtttcttactgcacgaggccaattgataggtctgaaatctcttttatgtgtcattgctgggacaggaatcattgcaatagcatttttattattcgctgttattactttcattatgggggaggtaatgatgcgggcgatctcctcggtgctattttaggagtgttttttatcgcgatcggcatcaaatgcctcaatacggttatgttcactaaaacaatcgcattttacttactcaatagggtctcccgccagcaaataaaattgaaacactcgtctggttaagattttgggtgtcaatgattgttcatacttttgcgttagttactatttgagtattcaatgcgtgacgatatcgtagtctggatattgactttaagatcgcgctgtcattatgtacagctattagattaactcggtgcggaaagtgattatatgactaaccttaattgatcgccagggaatgaaatgcgcataatatttttctgtttattaacttcttttttcatcgttctcttcccgttgggtgggctgttagattatttatcccggactagcaacgatttcttgaacagcaccggtttggggtttgccgatggggatgccgaccctctttcttgtgggttttgctgacgttgatgatgattgtgaccgtggggttgaactatctcatccgtaagattgtgccaggaaatagagtatgaaatttatgtgaagttattaaacaacggacctttgctggcccgttatttatccacatcattcccttttcttcagctattcaccttcatcgccataatagagcttgccgatcttaattagcggtcggccctgggatttacggtgcagattgctatcgcgcagcgagtagacgcagccgcagtactcctgctggtaaaagcgctcgcgcttgctgatatcgatcatccgcgaggatccaccctgtttacgccagttataatcccagtagaccatgcctggataatgcccggcggcgcgctcgccgcagtcgttgatttgctgcatgttcttccagcgtgaaattcccagcgaactgctgataacgctaaagccgtgctcgtaggcatagagcgcggtgcgttcgaagcgcatatcaaagcacatcgtacagcgcacgccgcgctcgggttcccattccatccccctggcccgcgcgaaccagttatcggtgtcataatcggcatcgataaacggcacaccgtgtttgtgcgcaaaacgaatattctcttccttgcggatttcatactctttctgcgggtgaatgttggggttatagaagaaaatggtgtagtcgataccggaggcctgaatcgcctccatcacttccccggagcagggagcgcagcaggagtggagcagcagtttatcggctccgttgggcaacgtcagctgtgggcgctggaactcggacatcaagtcattcctgaagtaaatacatccagcgccaactgtagcatgttgaagggctgctatccttccccagaaatgtcaggccgcgcaacctcacgcggcgctgaattcatctcaaattaacctctcacgccgagatagccgtggatcgccatatagatccccaccgcgccgattagcacgctggaaaagtaggggcccgtcgggcgagcgtgttaaaaccactccagcgtttggccacctggcgaacgcttaccgccgcgccaacgccgacggttaccagcgtcagcgcgaggccgatgctgaatgagaggaccagcgtcgcacctaaggtcagggctttgagctggatgcagataagcagtacggtgatcgccgccgggcagggaatcaatccgccggtcaggccaaacagtaagatctgccagttggtgacctcccggccgtcgaagcgacgttgaatatcgttcgcatgggcccgctcgtgggcgtcctgataagcctgacttccttcctcaaggccgtccagttcatgatgatgatgttcatgaaacgccagatcataatcgtgggtatggcgctggtggccgagcgtcaggcgtacgttaaagtcatgcggttccgggatggtctgcgcggattctaaataatcgcctttatcaacaaaagagaacatctgcgcgaagctgctcccgctgcgccgtgtcgccagtgagacatcgccagcggcccatcggttgccacttagcgtgcgtatgcgccagcgcggcggttctccttcttcgaagatggaaagggcgattttaccgtggccggtgtcgacgatttgcgtttcatcatcatgatgatgcgcatcccgatcctgcatggcctgcagccagttacgttcaccgcgccaggtgcgccagaacatccatattgcggtaccgagaatgatgaacgcggaaaccagctgtagccagggttcagccgcttcggcggtaaatttctggctaaaatacatgccgccaaaggcgatcagccagacgatggcggtatgcgaaagggtcgcggcgaggcccagcatcaccgcctgacgtaccgtgcctttaatggcgatgatgaacgccgccatcatggtctttgaatggcccggttccaggccatgtagcgcacctaacagaatggcgctggggataaagaaccaggcattgccctgctgaagtaaaggtaagaattcgttcataagaaaatagtggtttgtcgttggtgaacgggattctactccccccagtataagatactacccccagtagattacaaacctataattgaggcattgagttcgccagtgaggttaacgtgtcgcatacgattcgggataaaaagaagctgcaggccagagccagcaagattgaggggcaggtgagcgcgctgaaaaagatgctggatgagccgcacgaatgcgccgccgtgctgcagcaaattgccgctattcgcggagcggtaaacgggctaatgcgtgaagtgatcaaaggccatctgacggaacatatcgttcatgaaggcgatgaagtgaaacgtgaagaggatttggacgtggtgctgaaggtgctggattcctatatcaaatagtgtccacggatagcgccggcggcgacaaacgcgccgccggcttcagcattagctgtgtttgttttccatctcaaaacgcggtgataccaggccgtacagcgtccagcccataaaggttacgatcgcgccgtagagcatcgcctcttcgccggaggagtacagcgcatagaagctgtacaccgcgccgataaaggcaatcacgttggtggatcgcgctttgcccggttccacattggccattttctggataatcgccagcgccgccatcgacagaatgtacgggatgatgttagtcaccaccgccaggttaaccagcacgttgaactggttgctcaacgacgggctaatggtcatcagcgacaagccggtttgcaggataacgatggtcagcatccctgaatcggcgcgccggaagccgagacgcgggagaagattttcgggaagtaaccttcgtcagacgatgatttaaagacctgcgcgatggtgaactgccagccaagcagcgaaccgcagcaggacatcaccatcagccccataatcactttacctacgccaggcgtgaacatctgggcaaacgccaggccaaacggcgccgtggagttagccagatccatgttcggcacgatcccggcgatgacgttggttgagacaatatagataaccgccgcgccgagggtaccgccgagtacggcgatcggcacgttacgttccgggttttcgaccacatcggtgttggcgcaagcggattccagaccgaggaaggcccacagcgtcatggcgattgacgaaccaacggcgccgaagaacggcacgtggtgcgggttccaggactcgacgtacatcgtcgggctaaaccagaaccagccgatgacgcacaggccgacaaccggaatgattacccccatacggtgatgctactgatctggccggtaatgcgcgcgccgccgaagttggctacggtacagatccacagcaccccgatagtcgccaggccaatctgcaccggcgacagggtggcgccgaacagctcggtgccgtaacccaccgcggagatagcgatagcgacgttggcgataagcagcgagacgccgtaggtatagttggccataaagttgccagacttgccgaacgcgtactcggcgtaaccgcccatcccgcctgatttacggctaaacatcccgcatttggcgaaggcccacgccagcgccatcgatcctaccgccgtcaccagccaggagatgatggagatagtccccacctccgccagcttggtgggcagcatgatgataccggagcccatcatgttgaccatggttaagatggtgagctgtaccactcccatcttgttactggatttgctcatacagtttcccctttcagcagcgcgctttgtttctcgctttccgcgatgacatagcaccagacctgtttacggccatcgtgctcctggatataaaccccctgcagttccggcgcgaagcccggcagcaggttgatcccttcttccagtgcggtgaagtactgcagcaccgcgccgccccagacttcgcccggaactacgcacagcactcccggcgggtaaggcagggcgccttcagcggccacgcggccttcggcttgcggcagcggcaccagatcgacctggccgcgcagataggcgtagttagcctcttgcgggttcatcaccacgcgtgggaagtgatctttacggaacatctctttttgcagctgtttgacgttgtgacgggcatacagatcatgcatttcctgacacagctggcgcagggtataaccggcataacgctctttgtgctggctgtagatagatggcagaacctcctgcagcggcgcatcggcgtcgagcagcttatcgaagcgcgccagcagggcgaccagttgctgcagtttggccatatcttccgccggggtcagcaggaacagaatggagttaaggtcgcatttttccggtaccacgccgttttcacgcaggaagttggcgagaatggtggccggtacgccgaaggcgtcatattcgccgctggcggtattgatacccggcgtggtcagcaggagtttgcacggatcgacgaagtactgatgctcggcataaccgtcaaaggcgtgccagcgttcgcctggaccaaactcgaagaagcgcaggtcaacggcgatttgcgcggtttcatatgactgccacggtttgccatcgaccattttgggtacgaacggacgaatgtgtttgcagctttcaaggatcaacttacgcgccttgataccgttcatgacgcagtccatccacatgttgcggccgctttcgccttcatgcattttggcgttgatgtccagcgcggcaaacagcggatagaacgggctggtggaggcgtgcatcataaaggcgttattcagacgcttatgtggaacgtaacgctgctggcctttgatatgactgtctttttatggatttgcgaggtctgggagaaaccggcctgctgtttgtgcaccgactgggtcaccagaatgcccggatcgttttcgttcagctccagcagcagcggcgaacaatcagccatcatcggaatgaactgttcatagccgacccacgcggagtcaaacaggatgtaatcgcacagatgaccaattttatcgaccacctgacgagcgttataaatggtgccgtcgtaggtacctaactggatcaccgccaggcggaatgggcgggcatcctgtttccgattcggcgccacttccccgaccagctcgcgcaggtagcgctcttcgaaacagtgggcgtcgataccgccgataaaaccgtacgggttgcgcgcggtttccagatagaccggtgtcgccccggcctgcagcagcgcgccgtggtggttggatttatggttgttacggtcgaacagcaccaggtcgcccggcgtcagtagcgcattgagcaccactttgttagaagaggaggtgccgttgagcacgaagtaggttttatcggcgttaaagacttttgccgcatgctgttgggcaatgcatggcgccccttcgtggatcagcaggtcgcccatggcgacgtcggcgttgcacaggtcggagcggaacagcgtctcgccgaaatactcgacgaactgattaccggccggatgacgacggaagaattcaccccctgatgccctgggcagtcaaaggcgctgttgccctgtttaacgtaatcgaccagcgcgctaaagaacggcggacgcagttcggtttcatatttatgcgcagcggcttcaagttggcggccgtagaagtcgttgcgggtttcgtcgtgttcaaataccccctgcaccgaagccatatattcggccgggacaacctcttctttattaatagcgataaataccgggatgttatagccggtagcttttaactcatcgagtttaccgccttcgatatcttccagagttaatactaccgcggccacatcaataaagttggtttcggtagtattgacaatattacgctgggtagaaaaacagtttggacatgtacggctaacggcaatttttaaatcagtcattgttatctctttattttcagataatagcaggccctcaatttctcgaatgagaaattgattacgccggacaaaaggtaatagtctgccgctgatataataaatatcagtagagtaccttttgagatgcaataaaccctaccagtccggtggctggtaaatagcaggatttattagggcgagcgcggttagctacaggcgaacgcctgtattaacaacaaaagatgcaggaagacctgtatgctgaagcgcccgtagtcggaagactaccgggcattaaagaaatgaaaatcgaagctgttacggtgagcaaacatcataatatgcgttgtccgccttatgtgtggcatcatcctgttattgttttccatgatatacacctttcaaatgattgactgaaggtatggcatattctatatccggcttagacttaatctgtgacgccgatcactaatagcctctcattatgatatcaatggctggtattttgatcttatccaacattattcactggtttgttgtttgtatgtaaatatattgtgttgcaaaatggttaaaaagaataatggtcggttaatcattgctatatttcagccatatgaaggaattatgtcgtatactcgaggctttctgacttctatcctgttaacattatgtttattaagggttaagtggttcctgtggtacgaaagaacgctgtcaatcattatccctttgttgccaacataaaatctgggaaaagagagcctggtcgagttttcatctaaaagatatcgcccaggggctagacaaaaccaccatctggttatcaaatggttaaataaaattaacgcctgtgtgaacaataggcaggtagaaaaaatggtcaatacgcttttcggcatgacaaagcgctgagatcgccttattgggagaagttatgcattcctctgttaacaaaaatgaaagccggaccttctttggtcacccttaccctctgggatcgctgttctttaccgaaatgtgggagcgattctcgttttatggcattcgtccgttactgatcctgttcatggcggctaccgtctatgacggcggtatgggcttagctcgtgagaacgcgtcggccatcgtcggcatcttcgcgggcgccatgtacctggcggcgctgccgggcggctggttggcggacaactggctcggccagcagaaagcggtgtggtacggctcgattctgatcgcgctgggccatctgtcaattgcgctgtcagcgtttatgggcaacaacctgttctttatcgggctgatgtttatcgtgctcggttccggcctgtttaaaacttgcatctcggtgatggtcggtacgctgtataagaaaggcgatagccgtcgcgatggcggtttctcgctgttctatatgggtatcaatatggggtcgtttatcgcgccgctgatttccggctggctgattaaatcccacggctggcactggggcttcggcatcggcggtatcgggatgctggtggcgctggtgattttccgccttttcgcggtcccggcgatgaaacgctacgacagcgaagtgggtctcgactctacctggaatagtcctgtcgcgaagaaaaacggcgttggcgcctggctgctggcgctggcggtcggcgtggcggtggtgattacgctgattgctcaggggtgatagtcattaacccggtggcggtcgccagcatgctggtgtacgtgattgccgcgtcggtggtgctctatttcatctacctgtttgtttttgcgggacttaaccgtaaagagcgcgcgcgtctgctggtctgctttattctgctggtttccgccgccttcttctggtcagccttcgaacagaaaccgacctcctttaacctgtttgcgaacgactacactaaccgcatgattggtgatttcgaaatcccggcggtgtggttccagtcgattaacgccctgtttatcatcctgctggcgccggtatttagctgggcatggccggcaatggcgcgcaaaaacgtgcgcccgagcagcatcaccaagtttgttatcgggattctgtgcgcggcggcgggtttcggcctgatgatgctggcggcgcagaacgtgctgagcaacggcggcgccggcgtatcgccgctgtggctggtgggcagcattctgatgctgacgctgggcgaactgtgtctgagcccgataggcctggcaactatgaccctactggcgccggaaagaatgcgcggccagatgatggggctgtggttctgcgccagcgcgctgggtaacctggcggcggggctgattggcggccacgtgaaggccgaccagctggatatgctgccggatctgttcgcccgctgctcgacggcgctgctgatctgcgctgcggtgttgtgcgtgctgattgtgccggtgcgccgtatgctggagaacagtaaatccgtcgagcaaaaaccggcgaccaatgcctgattgcgcaagcggtcaatgaaaagccggcgctgagcgccggcttttttatagtaagcagagtatggaaacggtagcccggataaggcataagccgccatccggggatttccctgctcgcgctacgcttagcagggttacggttttgcagaacccaccgccgggccgcggtaatcgccgccgagggctttaatcaacgtgatatcggtgctaaggcgctgggcctgaatatccagcaataacagctgctgggcgatggccggtcgccgcgcttcttccgcggcatagcggcttaacaggccgcgctggtgatgggcgctggcgctgcgggtggtggccatcgctgccgtcaccttcagctcctgcagcgccacctgctggttgagatcgttaagctgactggagcttatcgccacgtcccgtaccgcatccagcaccgcctggttgtactgcttaatcaggatattgctcgccgtacgtaccgacttcagattggcgttcaggcggccgccatcgaatatcggcaaatacagccccggcagcaggttaatctgctggaaggacgacttaaacagatcgccgacgctcagagcgttatatccccagaaggctttaatatcaaaatgcggataaaaggctgctttcgccgcatctatctggctcatagaagcggtcacataaccacgcagggcctgcagatccgggcgacgcgccagcaattcgaaggagagtgaatccggcagcgtttcctgcaacgccggcagggcgaccgggtggatctccggcatactctgcgcgtcggcgccaatcagcgcccgcaacgtttcacggtactgggttagcgtgccgcgggcggtaatcacctgctgctgcgcgcccagcagttccgcctgcgcattggcgatatcgacgctatcctccacgccgcgctgggtgcggtgttcatgcgcctgtaccgacagccgggcaatttcttctagctgctgcagcagaactatcttctggaaggtggcctgcatggcgaagtacagctgcgccacgctgctggcgaggtccagttcgataccggcggtttccgcctggcgagcgttcttttcgccaatagccgccgcgacgcgggcccgatcggcgccccataaatcgatattcagcgtcgcgccgacgcccacggtattgagcgtgtaccacgggccatttttatccaccggcagagaataggagtagggccagctaaaggatttatcggttatacgcatccggttctgtgccgccacggcggtcgcctgcacgcccattgccgattgcgccagctcgacggtggattgtgactgcgagatgcgtaggcgcgccgcctgcatggtaggcgaattttgcagcgcgcggtttaccagcatgttgagctggggatcgtgatacccttcccaccagcgggccgccggccagccgctattcgccaggtggatcacctgcgccagctgcgcctgttgcggattaacgatcggcacttcaccaggatcgtcctgaatcagcgcgcatcctgtcaacaggctgatggcgaaggccagcggtgagtagcgcagaaaacgtgctgcggcatccatttttatcatgacggttctgcctgtcgcgtaaattcagaaggtttgtctgaccagtccggcagggtggtcagtaaagccgccagcggttcgccgaacggattagccggatcgacaaccagcggcgcgacgggtgccgtcggctgctgacgttcaatatcatcggcatacgcctgtaactgttcggcgcagcggcttaagaaggggtctcccggcgcggcatagagccggtagccctcgctcaggcgtactatctcctgcgcctgctgccaggtggctttgctcggccaggatttcgcctgcggccacggatgcgcaaaggtgcccagcggctcggcggcgacccgatgcatcagcgtttcgctggtggtcagcgcctggaacagcggcactatctgcggcttatcatctttcgcgcgcaggaactcggctatctggcgatagagttgcgccagccgcgatttcagctgcggcgcttcgctatccggccacaggtaaagatgtacgatcgatgagaccagtacgccgagtaaaataccgatgacccggtcgcgtagttcggtcaggttggtcagtggaccaaaccagctgaggaatgccagcgagaaggtaaagccgatttggatcccggcgtaggcaatacgctctgacccggcggcaatccacgccgagagcgccattaccggcaaaaccatcgccagcaggccgacgatggactcggtccacggttgtacaaagacgatcaacaatagcgccagcagcgtggcgagcagcgcgccgccaatacgcagccaggttttttgcatcgtcgccccagccccggctgggcgacaatcacgcagctcagcatgatggtgtggataccttgccagtcggcggcggtatagaagacgtagcacagcagcgtcgccagcagggttttcagggcgaaatgtagataagcgggattgcgccaggcatccggcagcagcagcggcgacttctcggcttcaccctgcggcaggtcgatagtttcaccgcgcgccagtttcgccagcacatccgccatttcttgaaaaatcagcgtattggcgccgcgatcatcaatgaccggcgcggagaatgaaaacggcgtaccctcgttcatcgacggtgccagcgcctgtagcgcggcggcgatttgctggcgcaccgcggcgtggtcatcgcccggctgcagcagcgccgcgaggtgatagcagcgcaaggtggccgccatcagcgcctgccagcgcgacggttcggcggcaatttccggcgccgcaaaacgggcctgcttaaataatccttgcaactgattaaaacgtccggcgatctctttgaaggtcggtggcgcggcgttctgcgtcagtacgtcggcgacctgccgctgcatcaccaccagttgggcgcggaattgatagccggggaaggcctggcgaaagcaggcgttgaccaggagtgtgaccagcgttgcggtattgatcgccacccaaagccacagcagcaggcgcaccagaacttcactttggctggtcattgacgggaaggtctgggcataaatcaccgccagcgccaccacgaaaaacgccagcccgagtttgcccagcacgcgcatcagatacatcgcgccaaagaacaggcatactgaagcgaccaggcgaatcagcgggaaatcataggtccacttgatgatcagcagcaccagccccagcgccacgctgatggtgataaaaaacaggacgctgcccagcttaatcatcagaatgttcggctggctgacgtaaaacaccacgatcagcgccacggcgagaaaggggatctgtagggtcataaacagggtgatcagcaccgcgcagctcagcgtcaggcgcagggtatagttagcccgtcccggcgcgtcggcgagctcccgttgcagaagcaaccagaaattatgcatgccggaaccttatttcgcctgcagcacggcgctggcggaggcgcccatgcggaacagttccgggtcgggatctttcaccgcgattttgaccgggaagcgctgcgatacatgtacccagttgatgctcttctgaatcaccggcagcccgccaatgacgctaccgccttccggcagtacgcctgaaccaacggaatcgacgacgccgtcaaaggggcggctgtggttggtcatcaccgtcacggttgccggcacgcccggccgaacgttttgcagatcggtttcgcggaagttcgcaatcacataccagtggtcgttatccagcagcgtgaagaccggtttcagagcggaggcatattgtccgacggtggttttcagggcgataaccacgccgttaaacggcgcgcgaacttcggtgaactccaggtgcagttccgccagggcgatttgcgcgacgatcccagcgcgctgcgcgaccatcgcatcgacgccgctgactgcggcatcagcctgtttggcctgcaacagcgtggcttccagttcggcgcgggcggctttttccgcggtgcgcgcctgatcgagatcttcctgcgcggcgaatccctgcggcaccagcggttccagacggatacgggtcgaggtggtctgtttcaccagcgccttcgcacgctctaccgcggcgctcactgattgggcgttatactgctgggctttgatggtgcgctgggtcagcataatctgcgcatcaagcgccgccagccgtgatttagcatcgtccagcatcgcctggtagggacgcggatcgatgcggaacagcagatcgcctttcttcacccgctgattatcgcggatcggcatctcaacgattcgcccgctgacttccggcaccacgtcgatggtgtcggcgtagacgtaggcgtcgttggtttccggcgaagtctgtaactgccagataactacgatcagcgccacgatagcggcgaggacgagagccaacaagggccattttttccgtaaaacgcttgggctggaatgagtcataggtatttaatgtgcgaaaagaagaaaccacagaatagtggcaaatagaaacattaacgccaggtaacttaataccagcggggaaaagcgcgcctgccagcctttacgggcaatcaggatatggcaagggatcagcagtaatgcgccgcctaaaaagcagaagaaccagccggggaatgctgcgcctaataccggtatggcgggggataaggagcaaccggagaccgccaaaagaagtaataacaatgccgggcgcgcccgttttacaatttgcttcaaaggaagatacctgaatgttcatgccattgaacaattgagtttattcgttgttaatcaaataatccctcaatacaccgcctaaattatagcgctgatggtttgcttagccgagttatggttatcctctgataatagtttaatttcgcgtaggtattaaaaagtcgctttctcattagcgaaataattgaaatagggcgtttctcatttctccatagtcagtggctatgccgcgagctattcttaggtaagcataataaaaatactgaggcaatgtcatggataaggaactactggaagcgggctaccgggcctataccggcgagaagatagatgtctatttcaataccgatatctgtcagcactcgggtaactgcgtgcgcggcagcgcgaagctgttcaatctgaaacgtaaaccgtggatcatccccgatcaggtggatgttgcgacggtggtaaaagtgatcgatacctgtcccagcggcgcattgaagtatcgccacaaataagcgaggaaatgatggaaattctggaaggtcacaacaagttctacgtcaatgacgccgagggaaaccaggtggcggaaattgtctttgttccaaccggtgaacatctgagcattattgagcataccgatgtcgatcccagcctgaaaggccagggcgtcggtaaacagctggtagcgaaagtggtcgagaaaatgcgccaggaacagcgaaaaatcattccgctgtgcccgtttgccaaacacgaattcgataacacccgcgagtacgacgacattcgcgcctgaaatacggcgccagctgtggctggcgctgctccgcgattacccggccaaccggcaggtggcatgatccggtaaaaatcgctgaatgatctctcccagatgctcgcgagtgaccggtggtgagaacagatacccctggaaacgatcgatccccagcgcttttagctgattaaatttctccagactatccaccccctcggcaatacagcggctctgcgtcagctggcagtagtaaaccaggcttttaatcaacaccagcgcgtgcgggtcgcgctgaaaatcattgacgatactcatatccagcttgtagccgctaaaacgcgccgtgcgtaccggaaacatcacgctgctgtgcgagaagcagtcgtcgagaaagatgcgaaagccctgctgctgaatattgctcatattcgccaccgcttttccctgctgctgtaaatcgacggtttcagcaaattccagaaccagccggtcggcccactgcgggttctgtagctgttgccaggcggtttccatcatgcgggcaagattatcgtgatgggcaatgcagggggaatgttgactgaaaaataaaactcaccctgatagcgattgatattctgcaccgcttcctgcaggacaaaggcggtcagtaatagccaggcgtattcggagtgaatatgcggtagaaactcgcccggcggcagtaccacgccatctttgcgccagcgcgataaaatctcgatgccctgcaggcgtaagcgctcgtcgacaatcggctgaaagaccggaaagatctgccggctgtgaatagcatggataaactcacgttcgaagggggtcagcgcggtcatgccctgacctgttacgcgtttgcttcggctgcccggaaaccggctcgccagatgcggatgatactccaccatcttgtttaatcctgaggttctttggttgtagagcgttttctgactgacgccgcggatctgcgcctgactggtgatgctatggccatacagcagggcgagagtggcgttaagttcgattttgcttaagcccgacggcggcttgccgcgcgccagcgcctcaatggcggaaagctgttgcagggcggggtagctgaccaggccgcctttcagcaatgccgccagacggcggtacggtagatcggaagagaccgcctgtacggcggccagcaggcggcggtcgccgacctggtgcagtaaggtttgccatagccacggcgccgggctacggcttaagatcaccataggcaaaggtcgtttggcctggttgagtaaccaggcggcttcgcgcaggacgaacagtagccaccagggatcgtcgggcagaaaaaccacgatttgccggacgtcggctggcgcagatatcgacagcatgctctgcacccgcggctgtagccacaccggctggcggcaaccgtcgtcgaccattcgggctaatcccgccgccgccatggcgcagggcgacagaatgtaatccgtcgtcgcctgtgggatatcggctttactggtagacaaacgtcaccccaataatcgactggacgttacccgccgttacctggccgctggtccgcgcgtaggtggcggtcagccccagattcaccggcgaagtgccaactgtacccagtgagacattgctgttggccggaaccgcggtaccgttgcgtgtcatctggacgccaatgccctgcgctggcgaagcggaagcggtattggtgaaaatggagttggcgctatcagcagtagtgccggataggtaatagccaagattctggttctgcgcgcaatggacggtgaccggcaccgccatcgagcccggataatcgggtaacgtcacggtcacatcgcgggcggagacatcgcaaccgccggtcggcacgacaacgtcgttattggcgtaaatattccacacgaactggaaggagtcgccgttgtagttgttggtctgatgcaggatcagtacggcaattagcgatccggcagtaatcgccaccccgcccgcagtactgaccggagtcagatagagtacggccggccagggtttatcggtagtcgaatcgtagattacgcgcgaggtttccgtggtggttgggaacggataagaggtaccgttatattttacagtaccggaaaagctcgagagcacaccgccataggcggatccgcgctgcagcgtcacatagtcggtaatggtttgcgggtagtcgttatggcagaaaatttgcgtcgacaggtcaaccaccaggttttgtccaacgttgactgccggggtcaggttgacgtacacgttggccgagccgccgccgatggggatggttgcgccggtagcggttttacaggcgaaggaccaggcgttaatcgaccagcccatcagcagcagggtggtaaacagagcgataacttttctcatgaataaactctcctgactcaggcgtaggtataggtgacgctaatcaccgcctgaatggttccctgggtggcgccgccgttaaccgacagggcccgaacctgcagcggaaaacgcgccgactgcgagctatcgtcgacctgaaccgacttttgcgccccgttattgagcgtggtgccgctgtcgtcctgcagttcaagctggatgttgcccgcggtaccctgattcttgtaatagccggtgctgtccgcggtgccgctaaaggtggcgacgacgcgtgacgtgccgaccgggcagttgcttaaatccagcgcagtgctgtgccaggccgaagcggaacccgccgacaccaggctgaaggtataaagatcgccgaggtcgacgctggcgttagtggtggagaccgtacacggcttggccaccactttgccgttcaccgtgatggtgatgtcggcggcatgcagtgggataacgtttaacgccagcgcgcctgccagaagccatcctgcgtagtgtgctttcatttcagcctccggttactggaattcaagggtaaaagtcgcggtggcatagacgtgaccggcggtcaccggtacgcgggttgccatcagccgggcgtaaaaaccaagggtgttggtctgccccggcgttaaggtggtccaggcgatcgacgaagagggcgcgttgaccggcagcatcgtctgctggccgttgaggatctgcaccgccatccccgccgccacggaggcgccgccgtcgatttttaacaggtcgttattgtcgctatccggggtgccgttaaagccgactttgaccgccgtcaccgagctgccgcagggcgacagcacgatgcgaaacggtaccagcggcgtggtcgcgccgacggcgttaaactgcttcgcggcgttgtccatcagatcgacgttaaactctttcgattcggtggccaccgcgcaggcgttgtcgcgcacgtagccgctgatggtgatggtgctgtccgccgcaaaggcgttggcgcagaccagcgtcaggacggcgccgaacaggttaagtggttttttcatcatcatgcgttccttaacggcactctgccgatagctggctcagcgcctgccgctgactctcttccggcaggcggtagctggccatacagctggcgtccgcgccttcgccccatttcacctgtacgctgccggcgagcggcatcccgctcaggtagacctggccgttatcggccacgatactgccgctctgattgctgcccgaggtgaccattgcgccaaacggcaccggtttgccgttatgggtcaacgtcatcagtaacttgaccccgacgtgggctttgaagtccgccctcacgatagcgccgtgggtagggacgacgctcaccaccgcgtcatcgagatcgacgttatcggcaagcgtattggtatccagcgccacccggttttcacgatattcggtggcgtaaggcagtaccgcatagccgcgccagtcggtacgcaccccggtctggttttccacttttacattaccggcgcccggcgctttcaccagtaccaccgtgtcattcagcggctggctcagggtcacaccgttggcgtgggccagcacgccgccgctgacgccgtagtacagctgtttaaagccgtcgctgcggctgtagccgacgttggcgttgccgtagccgccgcggtagttcagcgccgcgtagccggtgccgctgctatcgccttcgccgccgctggcatagccggtctgcacgctatagctcaggttattatcttccagcagggtgccgtaaagtcccgccagattggtcatccggccattaagatcgtgcgacatgctgtagctggcgctggcgtgccgccataccgatttgctgtcggagcgcagccagtggctgaacggaatattgacgttgaccgccagcatctggtcgcggccctgctgccaggcgtttttggtcaggctgtagctcagcgtccagttgatgtcgtccaccgccgcgttgagtccggcctgtagctgctggtccgccttgccggtcgaccagtaggtctgatgactgccgctcagatagagcgtggcggtacgccctaactgttgggtcacgctcagttgcactttgccgcgcttgttataggcgaggttgtagtaatcggtgaatttcggcttcacctggatcacgccatcctgggtttgtacgtcgtaaccgctcatccggcggtaggtagtatcggcaaagctgtaataacctttagtggagtagcgatagcccaccagttggatattggtgccgacatcgctcagcgacttgttatagaggaagcgaatcgactgcccctgatgatcgctgtcgtcgggcagggtggcgttggcctgggtgacatccagcgagacggcgccgaaatcgcccatgtttttccccacgccgagattaaaagcgcggtagcggtcggcaagctgcgtaccgccatacaaagtccagcccgcaggcaggccgtgtaacagggtgctctgaaagaacttcggctcttcctgctgatcgttgccgctgcgatattcgccggcggtcagcgcgtaccgggtatgcccttcacgctgcagtaccggcaccgttgaccacggcacgctaaagacctggctggtgccgtcgttttcttttatcgtcacctgcagatcgccgccgttgcctgcggcatagagatcgttaatggtgaacgggcccggcgggaccgtgctctggtaaatctcatagccgttttgtttgatcgacacctgcgcggtgccgcgggcgatgccgtggatcaccggcgcaaagcccttctggctatccggcagcatgttgtcatcgctcgccaactgggcgccgcggaagttaatgccgtcgaaaacatcgccgttggtatagctgtcgccgagggtcagacgcgagcgcagcggcgtgatgtcgcgctcaagccaggtgttaacatgctgccatttgttctcattgctggaactgctgccgccgctgctgtagctccaggtggtgttatcacgcagccgccaggcgccgaggttaaggccgctttgcaggtttaaataggcatagttgctgctgccgccggtatcgttatggacgttgttaccggtgaagttgtagttcagcagcccggcgttgatgccgtcatcccacatttctggcggaatataaccgcgcgcgcggttgcccataaaggcctgcggaacggtgaggtacaggcgctgctggccgacatcaaagcgcgtcgtggcatcggtgataagttcggtcagcggcacgcaggcgtcggcggcgagggcgttcatcccggttaccgccgcggtatttacccccattccggccagctggccgcgggtcagacacgggctgagcccatggcctttttcgccgcggttaaaagtgacatcgcgagtggtcataaagccgtcgttaaggtaaatatcgacgcggtaggtgccgggcggcacctcttgtccgttttcgaaaccggaaagatcggctaccgccgcagggtcgtcagccaaaaagcgcgggttaaaatagagttcagcctgcgcgtggcccgcctgcaggacaaaacagagcgccacggggagtttcgccatggccaaaatagcgcgtgggcggagcctggcgctgcgggaaccaaaacggtccagtccatatttgagatgtgacatagtccctccggtctcaattcgcccggctgtcagttcttattgttatgcgcggcatggcccgcccggcgggccaaacctgtattaacgcagcacgccagtcatttttggggtcagcgcgccgtaatcattaatcgtgcgataagtaatgttgctaccggcatccggcggcagcttgacggaggttttacccattggcggcaccagcgcgttttccagcacccgggtgccggcgttaagttcggtgacggtcaggtaataaggggtagggttagtcaacgttaacgacgaaccgctgcggctaaagctcagcttttccgccgcctgatccggcggcagcgccagcttcgccgggcgataatagagcttaatacggctgataatcgccagctgcagggtattttcgctcagtttggatttatccatcgacgggatggctttcacgttaatccagaacagactttctcgatcctgcggcagttgtttattggtggcgtcaatgatgcgcagggtattctcttttttgccctgcatggcgaacagcggcggcgtaatcacgaagcggccgtctttgccgccgtcggcgttttccacccacgactgaatcagataggtgctgctgtcgtcattattggtcacccctaactgaacctgtttttgcccggccggatagataacccgcgtggcgccgagcgcgacgccggcctgagcccaggcggagtaaccgcttgcggctatcatcaataatcccgccagtagtccgcgtgtcatccccagtctctttttcacgtttaccccttttgtactcaccgttgtttcctgtttccggcatatctgctggttaattactgataggtcagagagaaccaaacttgcgcgtttgccgctcccccggtgacctgattgccggtcgcccgatatttggctacgaaatgcagcgtggtgggtccggtatacagccgccgccaggcgcccggcgggctattcagcggaatcaattgatcttcgttatcaaataacgcgatgcctacgccggtggcgatacccggtccttcaccaaccgagagcacatccggatttttgccatcggccacgccgcgaaaggacacgccgacatgctggctgactgcggtgctgcaatcctgaaggtgaatatcgaatggcacggggttggcatcctccccggctgaatgaaagcgattgctgctgatctgccccatattgaccgtcatctgctggtcgccggcttcaacacggcaggactcagcgataatgacgccttgaaaacgcatgtttcccccggctaccgtgacgttccagtggttgccggccagcgccagcggcggaagcagaaacatcagcagacctgtcttcactccttgcatcgttatcaccccaatcccgtagtggataacgggccatcctggcccggaatgcttccctgtctgatgtttgaattactcgtattgcactttgaaggtggcgtctgcgttagcagtaccggcagttgccgcgccagtggcgtagtaacgcgcctggaaaggaataatgttggtgccgtcgttcagcgtggttgccgcgctgaaggtagcgccatccaggcccagcggagtgccggttttgtcgaggatctgtacgccgacgttggtcgcgccgccagcagcggagctctgcagagccagaacgctggtgttggtgctgtcaaccgcggtaccggagaacgcaacagaggctttggtcgcgacagtggtatcacagtcgtctaactgaatgttgaaacctacagcggagctggtgctgcccgcggtagccagttttgccgaacgaacctggcctaactgaacggtctggtcgatagaaccggcatcgactgcacaggctgcgttgacgatttctcctttaaaatgcactgtaccgccatttaccgtggtggtatcggccagggccgccgcggagctcagggacagagctgacaggacaacgattgccagtgttttgattttcatgctgttttcctttaaacaaaatcgatattacgaaccaaaaatggcagtcgacttgccttccaggcattccataaatcagccgaatggtgcgactgccggttctgcacagttttcgcccctattgatgagtcaattggggccattttgactcatcaggatttatggcttttattttattaatgatggttgttttttggatttatatacttctgatgatttattttatggatttaaaaactatgaatgtgccggggatggcaaagcggcgtacttgacttcgatagcgaaaagcgggcgaatgcgagatagtctgacgaggataagtaaagaaaggtcgttggagaattcaatgaaaatcaattagatataatttttttgatgaattatgcacttgtcagttgcaaaagattacaaaacatttttatgatatagacagtttggccccaattgacttgttcgatattaaaaattgtcctttttatcaatcggttatcctatttcttccgcgcttgtaaattttcctctaacagattgtttctttcccaaattccggcaaaacgtgctgcattactggcggtataacggacagtatgacgaatattacgatgtccgagataatcttgtatcaaacgggtatccgcccccctttccgccagttcatagccgcaggcgtgacgcagcatatgcggatgcgtatgcgtcacggttcctgcttcttccccggcggcgcggataatgcgataggcctgttgtcgtgaaagcggggtgccacgacgcgagataaatagcgcgtcgcttttacctgctgctttccagcttgcccgctgctgcgtccagcgctctatcgcttcgcgttcatcgaagcgcagcggatgtacggtagagaaaccgttttttaagcggcgcacattgatacgaccttcgttaagatcgagatcgcgatagtgcagatcgagtaattcgctgatacgcatcccgtggcgaaaggccaacaggatcagacagtaatcccgctctccggttgggccgtgctgggccgcctgcatcattgcctgtacttctttggcggtgagaaaacgacgtcggttcacaattttgagctcctgaatttaagtttactcgcaaggaacagcctgagaaaaagatcccaggatggataaaaaataatctgaatgcaaaggccgtattatttgaaggggctaatgacaaaacaggtatcacattacatttacacatgtataaattatcgccacgcgataattcttatttttatctattttattctttaccacaatagagccgcacgaggtcgctggcaggtgcataaaatagcaaggaaaaaagttaatgccagctatttattggacggaaaaccggtgctgaaaggattaatttaacaataaataacgaactaatatcctgatgaattacaggtgcataggaacgttttttttcatgttctaaataagaacttttaagaacaataaacatatttaacgtatggttaatttttattaatgtttcgcaagaaaaaatctatatatgaggaaagctgcattttatcgcagcctaaacagagcaaatttgcaacaggcacgccgtgggaagggtttgcaaagtctcgaaggggaagtgcgatgaaccgataacgaaacgccatccgtggcgtaaagttaccttactggaaaagcgaggttctctgcttctcgcgggacttatcccagatgccataaaagcgcccggcgttactggccgtgtaccagacggtatggcgaatgttgcggtggccgagataatcctggataagtcgcgtatcgatgcccatattggccagcgcaaaaccgcaggagtggcgcaacatgtgcggatgaatttccagcggtaatcctgcctgatcgccagaggcggaaatgatctggtaaaactgttggcgtgacagaggattacccttacgcgataaaaataaccactcgctggtggattgtggatattcatcacgaatatccaaccagcgctttagcgcctggacctctttattcagcaacggatgagtggttgaaaaacctttttttagtcgatggatgtaaatacattttgaacgtaaatcaatatcagaaattcgcaggcgacaaatttcgctggcacgaaagccatgaataaaacaaagtaatgtcaggcaataattacgagctgcatgtggtccgctattggcagcattgagtaatgactcgatttcattctgagtcaggaagttcctttttttaatatcactattattcttcattatgttccctttcttttgcaggcgtacattactatcccataggctctggctggcctattacaggatccgaagattgatttcgcattttatgaataagcatgatgcggatcgcttttaatatccctcaggtaacaaggactttatcgcggcaaagctgcgcgaaatccagtggatataatgaagtgacttcatcgcccggaagctgtacgcaggcgaattcctgatgcgaagcgctcaggcatttgatgtacatcggttttcctggaggtttacacgtcctgttcatcctttttcctcttgagtatgcgcgcttacagcaaggtcatagactaccggctgataaactgagtcctggctggataacgctgcaatccgttatccacgaggataattgcctcaataaacaggttggcgttgcgtaaatgttttgccatacaaaataacataagacacctgatagcattcaccgcaacactacaacagcgattaaaccatactgcaaaaatcgtagagagaatagcgttaataaatgtgcagacgtttcaaagagagattttacttattatcgagcagtcagaattttccgctcgtgtaatcagttaatgagaggcttaatcggagtttttaggaagttttaagaagttattgagaagggtaatttctgctgtaaccgcttatgatttataggaaattcatctctggttgtatcagaaaatagctaccagggcttgtcaggttcaacaacgtaatagtgaccagagagcccggattatatttgttgatgaagccgtatggcgctaatcaacttccccggcaagcgccacggcttacgaattatcttaactgctggtaaaacaggataatcgcaatggcaatcatgataagccctgaaaccatgctcactcctttcgccgcctgcgggcgggccgccagtaccgcccgcgacccatagccgaccaacagataaattagcgtacaggtcatcaggtgcatcgcacccagcgccgacatctgcagcgccagcggccaactgccgtgcggatcggtaaattgcggtagcagggcgaggaacaacagaaaaacttttggattaaggccgctaatgcataatcccttcaccgcccacgcattccaactgccagccgattgttgcgccgcgcccggcgccgccggatggcgtaatatcatgaccccgagccacaataaataggccgcgcccgccagcgtgatcgccgatagcgccagcggatgaccggcaattaacactccgactccggcgacgacgataatcgttgccagcagatgtccagacatcagccccatcaccgccggaacgacgcgacggccgttgataccggcgctgatggcatacgcccagtcggcgccgggggtaataatcaacaggaatgagactatccagaagctggcgatcaggcttatttccatcagcaacgctccacaacgatattagacatcacacactcgcaaaattaggttatcgtgtgagaaagaatatcgacatagaagcgaaatgagctttcaatgttatgtcataatccggcgataaaagagaaaatcttccaaatggatagcatagatcgaaaaattcttgctgagctgcaggcggatggtcgtctgtcgataactgaactggcggagcgggtgaatttgagcctctctccctgccaccggcgactacgcgcgctggagcaagagggggtgatcaccggctatcgcgccaatctcgacccgggaaaaatggggttcaattttctggctatcgttttcgccacgttaaaagagggcgataaaaaagcggtcagcgcttttgaggaggcggtggcggagatccctcaggttgtgctggcgcaacgattgtttggcgatccggattacctgatgcatgtcgtcacccgcgatcttcctgcgtttcagaaactctatgatgacaaactgtcggcgatgccgggtgtgcagcatttacgctcgacgctggtgatgaaaaccgtggttcaggatcgccctttcccattggagacgttaaacgcttcccgttaatgccctgctgccggggcattcagaatggcgaattaccacttttcatcacgcgcgtcgcggcggccttcgcgccgattttcacgtttatcttcgcgacagcgcatattgctcttgtcatcatttctcacgcattcacgtttttcttcacgtccactctggcgcgcatcctgacggatatcgcgagcatcctggcgtttttccgcgcggtaggtggcgtgcgcggtgagtgtcggcagcagcagggcggcggtaagcagaggcaggattatttttttcattgtcgaaccttaaatataaaaataaatcacggaaggttataattgtggttcgtaatcttatgtaaatcgatacaaaatgtgctgaactctcttttttttagtttattattaaacaagcttggtaaattctcattttattattctcgttgctacgtattttagcttattacgctaaagagattacgaatatagcatcaaggctcagtcgctttaagtatttgcattgatttttatcaacgattcttattcatccggttgtggcgggtatttggccgtgcgatgctcgcggcatgagatttttctcagtccccgcgaagttaaatggaattgttaataaaaggaatattatatgaagcattcagttattgctgctgcagtattttcaaccgtgctgatgagtgttaatgcttttgccgcggcgccaagtgaagagcagggcgagttagttattattggtaatgttattaattcttcctgtcgttttgaaaccgattatagcagtacgattcaactggctgatgttgacgctacccgttttgccggcatgtcagccggtgaggtcttatccggtaatttcgctaccagtagcgacccattaactatcgtttgcccggaaggcacggtattgaaatcgattgatattagcggcgggacctatactaccggcggcgtacttaatcctatcgcaactacaacgtctgctaatggtgtcggttttaaattaagactcggctccgcggatatcaatgaaaataccatatatgacgtcaataatttgccgggggcggtgacttctgtgggcaatggcgtttatcaaatgaacttttctgcgcaatacgcccgaattaatgccgccactccggtaaccgctggtgaagtccgctcggtgttaacgattgccgtctctgcggagtaaggacctgtgccggcgcttcgccggcaattattgtgctaagggtgtggtgctatgaaacggattttattagcaggtttatttatcgctatgcagcccgcgcatgccggagtggtgattttcggtacccgggttgtttatccggctgagaaacaagaagtggtcgtacagttgatgaatcatggcgcccgctcttcactggtgcagtcgtggattgacgatggcaacacttccttgccgccggaaaaaatcaacgtgcctttcctgctgtcgccgccggtggcgcgcataacgggtaactctggccagcagctgcgaattaaaaagttagccaacaaacttcctgcgaacaaagagtcgctgttttatctcaacgtactcgatattcctccgaatacgccaggaagtgagggggcgaatacgctacgatttgccatgcaaaaccgcattaagcttttttatcgccctaatggcattgcagcggtaaataaagatacgtttaaaaatatttcgttgtcttcgcgcaaaaacgctctgcatattgccaatggttcggcaaattggttgacgattactgaaattaaagtcagtaacgttaaagtcaatgagcgcagcgttatgcttgcgccgttatccagtcaggatgtcattttaaaaaataatctcgcccgccagtattcgctaacgatgattgatgataatggaaactttattagcgacaggctcaatgtaaaataataaataatggagttggccatgttaaggatgacgccgctttcctcaatgatattgttggttttattatccggtcagctgcaggccgctgaagatacttttgataccaatttcatgatcggcggaatgaaaggtgaaaaatcatcaagctttcactttgcggataatcaaccactgcccggtgaatatgaattagatatttacgtcaataaacaatggcgtggtaaatatccaatcgtagtcgccagtaatccggatgatacctgcctgtcatcggcattattacatcaactgggaatcaaagcggatagcgcgcagatgatgaaagataaccagtgcatgacgcttaaatctgcggtgcgaagcggcagttatacctttaatatcaatatttttcagcttgatttagagattccgcaggcctacgttctggatcttgaacgcggctacgtcgcgccggaaagttgggaccgcggtgttaacgcgctctatacctcttattatctgagccagtattacagcgactataaagacagtggtaataacaaaagcacttacgcccgctttaacagcggtctgaacctgttgagctggcagttgcactctgatgctacctacagtaaggccgatagcggcagcggcgactggaaaagcaacaccctgtatctggaacgcggctttgcgccgattttagggaccttacgtgcaggcgacatgtatacctcagcggatattttcgatgcggtacgctttcgcggcgttcgtctgtttcgcgacatgcaaatgttgccaaactcaaaacagaactttacgccgatcgtgcagggtatcgcccagagtaacgcgctggtgaccatcgagcagaacggcttcaccgtctatcagaaagaggtgccgccagggcctttcgcgattgccgatttacaacttgccggcggcggggcggatctcgatgtcactatccgggaagcagacggctcggtaaccacctatctggtgccttattcctcggtccctaatatgttgcagccgggggtgtctaaatatgacattgccgccgggcgcagccatatagaaggcgccagcaatcaggaagattttatgcaggccagctatcaatatggcctgaacaatctgctgaccctgtatggcggtaccatgctaggcaccgattatcaggctttcactatgggaaccggatggaatacccatctcggcgcgatatccgttgacggcacctgggcgcgtagcgatcaggatattggtacttttgaaggtcaaagctatcagattgcctacaacaaatatctcacccagactaaaacgcgtttcggtatggcggcttatcgctattcaaccagcgactatcgcacctttaacgatcatgtctgggcgaagaaccgtaatagttatcaccatgatgataatgatgtttacagcattgatgattattaccgttatgattttggccgtaaaaatagtttttccgccaacattagccagtcgttgccggaagggttagggtctttctcacttagcgcattatggcgtgactactggggaaagagcggcagcaataaagattatcaactgagctactccaataactggcagcgggtttcctggaccatttcggccagccagacctatgatgaggatcatcatgaagataagcgctttaacctcttcatttcgattccgcttatctggggagagagcgatagcgtgctggcgcgtcgcctgacgctgtcgaattcgacgacctttgataacgacggctttgcctccaataataccggtatcagcggtacaggcggccagcgtgaccagtttgactatggcgtgaactttagccggcagcagcaaaaccatgaaaccaccgccggcggcaaccttacctggaacgcgccgctggcgacgctgagcggtagctacagccagtcgtcgaaatttacccaggccagcggtagcctgtcaggcggtgtggtggcctggtccggcggcgtcaatttcgctaaccagctatcggaaaccttcgccattattcaggcaccgggcctggaaaatgcttacatcaatggtcagaaatatcgcaccactaacggtcagggaacggtcattttcgaccacgtattgccctatcgtgaaagctcgctgctgcttaataccgccaatacgcagagcaaaaccgagttgattggcaaccgtaaagcggttgctccctaccgcggcgcggtggtgctggcgcgtttcgataccgatcaacgtcagccatggcttattcacgccgaacgcccggacggtacgccgctgaaatttggctatgaaattgaagataacgacggacagaatgtcggcgtcgtcggccagggcagcatgctgtatatccgtaccgataacgttccgccgtcgattactatcgcgatcgataagcagcagggccattactgcaccattacatttaaacataccattgatgaaggtaagacctatgtctgccgctaaaaggacgattttcatgaaatggataattttgctggtattaagcttatgctcttttttagcgcgggcggggaactgtgaattaacgccgagcatccctccggaatctattgaggctagcggcaactacacttttaaaccgctggccgccaacggggagctcaatttgcgtgagagttcacttcaggctaacgcattcagctttcgctgccccagtaactcaaatgttaatgtttcggtcagtctgcaatcgccaccacaaacctcctactatgttgatgtaggcagtaagacctatgagattaatttctccttcgatcagactaaaatgaattcgctgggaaacgggaaaataattgaaaaccaggtatataacttgtcagatatgtttaatagtttgattggcatacgctatgagattaaagaaggcagcgctaacgggcagcgtgttactcccggagtgcctttccagatgcggtatggcatagttttgaagtattgtaagaataatgaatgtcataatgttaacatcaattacacctttaacgtcaccctgcaggtaaatattatgacctgcggttttaacgtcccgaaccgtctcatcaatatgggcgattacagctacttcgatattaaagaagacaaagcgcaatatcgcctggaaagcgttgatatcgattgtaaccaggacgagtcggcggtattcaaactgacgccagggaaaattgattattattttgtcgccgcttccggctttgccggcaccagcaaaatattgaagaatgacgatcaggatgccgccaccggcgccggcgaagttggttttcatctgcgcgatagccagggcggggaactccagtacggcagcggttttctttatcactccgacgaggaggcccgggatggcagaagcaacccgatctatctgcaaattaagccgatgaaatatggcgaaaatatccgcggcggcacgattaaaagccgggttattatcgtcatcaacaataactagccatctgcgccgcgcgccttccttggcgcgcggcgcgtgtgggttacgcggtcgcgaccggttcaggtcgcaactgctgctgacgaatacttatcagcgccaccagcgccagtagcgcgaaggccagcagcatcagcgcaatggggatatagctatcccacatcattaagaaggccaccgccagcatcgggctaatgcctccggaaatcaccgcgccaatttcgtgtcccagcgccagcccggtgtagcgtacctccaccggaaacagatccaccatcagacacggctgcgcggcaatcatcgcaccatggcacaatggcaacgccaacagcatggcgagcagcatcgccgggaaggtgtgcatattcagcagccagaagaaggggaaggcgaccagcgccatgccgatcaccccaatatagtaaagccgtttacggccaatgcgatcggaaagccatccccagccgagaatcgtggcgatctctaccgtcatggcgatggtgactgccgcgatcaggtcgcgagtgtcgataccgatgtgtttgcaatagaccactgaaaacgtgaagaagatatataccgcgccgttttccgccagacgcaggccgatagcctgtaatatcgctcgtggatgatttttaaaggcgctgagcaccggtaaatgatgggcctcatttttgctgtcgttttctgctttgcgcgccacgaattccgcgttctcctggatgttacggcgaatatagacgcccaccagaaagataaacaggctgagcaaaaacggaatacgccacgcccacgacatcacttcttcctgcggcagcagctgaaccagatagaatgccagcgaagaaagtacaaacccgccgcagacccccacctggctccaggcggtgtagtaccctttttggctttccggcgcgttttcgctcagcatcaacaccccgccgccccattcgccgccggaagccaggccctgtacaaagcgcagcgtaatcaaggcgattggcgccagtacgccgatatgggcgtaggtgggcagcagaccaattaagaacgtactggcgcccatcagcgtcagggtgatgatcagcgtcattttgcgactgtagcgatcgccgagatggccgaatatcacgccgccgagcgggcgggcgataaagccgatggcgaagccggaaaaggctaaaaatgaaccgagcagcgggtcattagtggccgggaaaaacagcggcccgaagaccagcgccgccgcggtgccatacaggaaaaaatcgtaccattccagtgagttgccgagaaaagacccgatgattaatttgcgcataggttgcgccggggggaccgttgtaccgctcacagctccagacataaggttaactccagtgcaggtgaatcaggcggcgcctgctggcgccgggcgatgggtcggcagagtttttatggttatgatgaaaattaacggcacgacgccatgctaagggtatggaactggcgattaaaccagaccagcccgtcgctggggttgccgaagcggatctgtttgacctcgcaataaaaaacgctgtggctgcccacttcgtggctgtcggcaatgacgcagtcgcagttcgccacggcggaagccagcgccggcgaaccggtctccagcgccagccattcgtcgtgcaggaagcgttcttccgagcggatttggccgttggcgaaaatcccggacaattgctgatgctgaccggagagcacgttaacgcacagcacgccgttgtgctggaatttgccgtgcgcgaaggacgagcggttcatgcataccagcagcgtcggcggcgaatccgtcacgctacacaccgccgaggcggtaaagccgaagcggcccgccgggccatcggtggtaatgatggtgatcgcgctgcccaactgcgccatggcattacgaaaatcagatgtcaggttcatagtaatacccgttatttcagtttgacgtattcgaagccttcaataaccagccgcggggttttggcccgcgaacagcacagcaggatctggtcgttatcttcgcgttcttcttcggttaaatactcgtcgcggtggtcaggttcgccgctgcaaacgttggcgaggcaggtgccgcagacgccctgttggcaggagactttgactttgatgccagccttttgcagcgcggcgacgatggtctcgttttcgccgacggtgacgctcagattgagttccggaaccgcaacctcaaagctgccgccgctggtttctacctcacggttgaaatactcctggtgcagccgctcggcgctgaaaccgcatccctgagccgtttcgttgacccacgccataaaaccctccgggccgcaaacgtacaggtggccggtggcggcgtgaggcgtcaggagttcctgagggcggatcctgccgttttcatcgctgatatgcagctgaacgtgggcgctaaagtggcaatccgccagttcggccagaaacgccattccctcacggctgtgcccgcagtagtgcacttcgaaggatttcccggcgcgaaatagcgtatcggccatcgccaacatcggcgtgatgccaatgccgccgccgatcagaatgctatgaggcgccgacatctccagtgcgaacaggttgcgtgggggctaatttgcacctcatcgccgggctgtaaagcgtgcgccgccagcgaaccgccgcgcgaggcgcgatccttgaggatccccaaccgatagcgctgtgggtgatgggcgctgccgcacagcgaatactggcgcacgatgccatcgccaagatgcagatcaatatgcgccccggcgctaaacgagggcaggggagcgccgtccggcgaggccagcgtcaggactaccacctcggctccctgaatttcgcgttctgtgacgcgtaccgtcaatgtttcagccatagtttttctccacccgcgaagggcttaacgcatataaatgccgccgttgatgtcccaggtcgcgccggtgataaaggtggcggagggggccgccagcagttctaccgcgcgggcgaccagcagcggatcgccaagccgcttcatcgggatcatctccagcagcgccggcattttctcttccggcaccgcggcgcgaacggaaggaagatccagcggccccggcgcaatcgcgttgacgctcaccccggcgttgctcagggcgcgggcgaagactttggtcagcgtaataatgccgcccttggaggctgcatagtgggcgcctgaggcagtgccgccgttttgtccggccagcgacgcgaggttaataatgctgccctgctggcgctggctgaaatagcggccgatggtctggcaaccgacaaaggtaccgcgcaggttggtactggtgacgcgatcgaactcctccacgtcgatctccatgatcggcgtggtcagggttaaggcggcgttgttgaccagcacgtcgagttcgccgaagcgtgtacggatctgcgccagcgcgtcgttgaactgttgcggctgacgaatatccagctccagcggcagcagccgctgctggctgggatcgatctcctgcgcgctacgggtgaccgcatcgaaattgacatcggccatcgccacctgatagccctgttgccagagatggcggctgataaccagcccgaggccgttggccgcgccggtaataagtacgctacgtgtcataaagtcctcacaggatgtagccaatgctatgcaggtaatcgtccccgttaatcaggcgcacgactttttgcagaatgcggaaactgtcgccctccggcgccagcgtccaggtgacgtcagcggcgtaatgctgttcattgcccttgcggtattcgtacaggagttgggcgcagcgtacttcgacgacctcatcgctggcgctgagcaggcgataacggccgctcatgcggatagtgcgcgcgcgcggggtggtggagatcgattcgccgctgtataaacgctgcacgcgtttttcccgcatctcgtggttgtcgtaggcatagttgagcacgttggcgaaatcggtggtcttctggtcgatgggaatgatgtacattccctcggcgcgccacagcgccagccattcacgaaattcgccttgatcgagcaggtccgcttccaggttaataaactgaatggcggcgttgaggataggtgatgtgttcattattgccccgggtatcagcggtcatgtactttttccattgttgataggcggcgcgcatgccggtttcggcgctgacgtcgctgcgcaggccgtcggcggtgcggacttcgccgggcaggccgcggttgagcatgatccacagatcgtcgcccgcgccgccgccgcgctgaacccgctcccaggcctctgaatcatcaggggtgccgaagcccatcggcccctggaagtgttcgtgcagccgcaggcgcgcctggttggcgatcgccgggccatctttcatggtcagcaccatgtgatgaatttccgtctcttttaccgatatcggctgcagcacgcggaagaaggccattgaacaggcgacattggggaacaggttaaggttaaaaccgctgccgccgactgcgcgtactatgcgccgcacctgctgctcgtcgtggccttcctcgcgcagggcctgggccagctcgctaaagcgctccgggattggcgcatcgagattggcttccagatcgataagctcggggatcatcaccatcacgctgtggccattgccgagatcttccacgaaacctttgccgtcgacgaagttgagcatctcttcggtctgtttatcgaccgagcttaaaaacgacttatggacgatcgggaagtgatagccgtcggtggtattttccaactggattttccagttgccgggaaagcgaaaacggtgcgcggtggtggcctgtagcgcgtagccagccccctgtttcatgaacagatccatccatttcatcgccgggccgaggaagtctgtcagcggttcaatgtcgtggttgaagcttgcgaaaatcattccggcatagctttcaacgcgcaggcgcaccatgccgagctcagatttgttcagcgtatcgccgtagctctccggatgcggcaccccgcgcagcgcgccgtcgaggccatagccccagccgtgatacgggcaggtaaaaccgttcgttttcccgctgcgatgttcgcagacggtggcggcgcggtggcggcagcggttaagcaggacgttgatattgcccttgcgatcgcgcacgacgatcaccggctgggtacccaccatcgaggatttatagctgccggcatcagggatttcgctctcgtgggcgacccatacccaggtacggttaaaaatgttgtcgatctcgaggtcgaaaatttcctcggaagtatagagacaggtatggacccggtcgctttgcaccagtgccgccagcgtttcggcggtatggctggtatcgatattttttaccggaatacattcagacattgtcactctccacatatctcttttaatgaccatcaggcaccggtaaatcggcgagcgaatgccagtcatctaccgggcggctaaataaattacgggtggtaaaatgatgaattaaccactgttgatcttgtttaataaattcaatgacgagctccgcgctatttaaatgcgagccgccgctgcgaaacgttgaagcttgcagcattttccagcggccaaccgcgtggttattttcgccaacgcgaatatgctcggccgttaaataatgtacgttgatggcgaagtgcgacggctcgctaatataagcgttcatcatcccgacgatcgccgctctaccgcaatggcgcccgagcttttgttgatataattcgccgataccttcccaaatagctgtttcgctaaatagcgcgccaatttgccgggcggtatccggatgggttaactcatcgcagagatgcatatactggctgatggcgtttcggatctgcaccacggcttccagcttttccaggcgttgcagcatttcttcattcattgccggctccgtataacttataaatagccgggctgcggcgagtggccgaagaacatattgccggcattgatgtacgtcagctcgcccataaaggcgtgctgggtgatcaccatggtgtcgcgggcatagcgctgcagcgggctgcgcatcgatatgcccggcatcccggccagtttcagcgcgcgggtggtaaccgaagcagagacgcgggtaatgtgagtggaagagaggcgcatggcgttaatccgctcttctcccggttcatcgccgcgcagaatcgcctgccagacatcgtcgatggcgtcgtagaaccagcagcgcgccgaacgcagatccgcttcgcagtgggcgatttccatctgtgcgaattggcgatccgccaggcacggcgcgccggtgaccgagctctggctttcggcaatggcgtaaatttccgataacgccgcgcgggcgatacccagcgcgaccactgacagcacctgagtggccagtgacagtaccggatagcgatacagagggccttcgaggttaagttcgccgccgcgaataaaggtccactcctgcggcacgaaggcattattcagcactacgtcatggctgccggtaccggagaggccgaccgtattccagaccggatcgatggtgaactccccggcaggtagcaccgcgatgcgcggcagtggacgatcgctgccgtcatcggtcagaatgcccacgccgataagttcggcgccgctgcagccgctggcgaagctccagcgcccgctgacgcggtagccgccatcctgagtcgttgccttttgcggcgggaagatcccgccggcaaagacgatatccggcccgtggcggtatagctcatcgagactgctcggcggcaggccgccaagataaaacggattcatgccgaaactcgccacccagccggcggatccgtccgccgttgagagcgtttcaattaactgacaaaactccgcaggtgatatttcatcgccgccgtagcgttttggcaccagcgcgcgataaacaccgatctttttaaagcgggaaataatatccgccgggatatatttctgctgctcgaactcctcgctgcgctttttaatatctgcgagtaattcggcaaactctattgtcgtggcgtgcagggtcttttccgcacgcgaagttgcagaggggtttaacatgcgatttagcctcttccagttaatgaaagtacggttttattattttaatttttccagcaaatactcagcgtaattaagtaaatcaaactctttatttttattggcgactaattgcagagccaccgggcgatgattaatttcgccaagcggaaggctcagggccgggtggccgcttaaattaaatgggcgcaccaggcgagtcaggttgaccaccttgagcggatccgccgcttcttccagcgttggcgggcattccggcagggtcggcagcacaatcagcggggttttcgccagttgggcatccaccgcggcgctaaattgctgacgcacgctttccgcagcctgccgctgctgagggccgatctccgcgccggcgcggatccgctgggcgacgtccggcgccaggttcggcgcgttgatgatgctgtgaaacgccagccagttttcctggcttatcaccgtaagcccggcctgatgcgcctcgttgaaccccggtagttcagcgcgagtccatgccagccccgcctgctgcagacgcgagaagatcagttgctcaatttccggcgttgccgtgcccgccagatagctcatcgcggggacttcccggcgcgcaggaggcgctgattcccccagcgcttttgccagcgcctgacgcaatgtggcgatatcgcgggcgaacaggccgatgcagtcgagcgaactttccgtcggcatgacgcctgcgcggctcagacggccaaagctcggcttcaggccagccacgccgcagcaggccgcgggcattcgcaccgagccgccggtgtcggtgccaacggcgaagtcgacttcaccggccgcgactacggcggcagagccgctggacgagccgccgggaattaactgcggataatgcggattgcgcggcgtaccgctatgcgggttgatgccggtgacgccaaaggccagctcgtgcagggtggttttgccgcgcaactggcagccgttatccagcagcgcctcgactacggcggcatggcgagtggcaggcggcgcatcctgcaataccgggctgccggcgcgggtcggaaaaccggcaatatcgagactgtctttaaccgcaaacgtcagctcgccttcgccaagggtgaagcgcgagataaacccggattgtgtgttttctgcctctgtacgatgttcagtaaccatgtttcacatctccgtgagggtgataattaccgcgcgaaatgactaaaaaacgacccgctggcgcttgaggtaatcttgtcagtaaaacttgaaatttcaagtaaattgttacccgttttttacatcgaaattgagggtaagagaatgctatgaaggagagggtattttttaacttattgatttaaatcattaaactttggtgtgtaaattttaatctcttgaagagcgtcacaaaaacaaatgaaaaatataagttaaaaaaatgataaaaaagtgtgcgaaaaacgcatgggagggcaaaataaaatgaataaccatttatagtaaatggttattttcgcagaggatcagtcatcaaggttgtgcagaattagcgccagcacctgattcatctttttttcctgcgccggggtgatgcccttgaaggctttagtaaacacggtttccgctaatgcccgggcttcggcaaccttggcttcaccggcggcggtgagttccgcttcggtgacccggccatcgctgacgctaacgtgggtcgtgagcaggccatcatcacgtagacggccaacaattttggtcaccgtcggcatcttactaacggcatattcggtgatccgcgaaatactggcgcggtggtattggtgcaccagcatcagtacgcggaagcgggaaaggtcgatgtcgatttttttgagctcgatttccattaattgggtataacgggcgtaaacgttaaccacccagaagaaggggaactcttctttatgaaagcggctctcgtggctctctggcggggtcgaagagtgagtcttatccacaagcatctccttgcctgacgacgatagaatgtgcagatggtatgcgcatttagcggttattgcaaaacgcagtactgcggaaaccgttcgctatgatgccgggaggatggcctctttgttagccgcgcgtggttcaccgcggcaaccgcctgtcgccggaggtcactcattctccagcaggcgcataaatatccgtaacgcctcgtctagctgctgaagttgggtgtcggaaagccccgccagcagttgttgctcattcgccacgtgggtggcaaccgcctcatcgatcagcgcttgtccctctggcgttaacgctaccagcatgctgcgggaatcctgaggatttgctaagcgggtaatcaaccctcgtttttccagcgccttgaggcgatgggtcatcgtgccggaggtaatcatcagtgtcgaaaagagctgggtcggcgacagcacgaatggttcgccagcgcggcgcagcgtcgccagcatgtcgaactcccaacgtaccagcccatgtttaacaaacgccgcctccacccgcggctccagcagcatggcgcagcgtttcaggcggccaattggccccattgggctgcaatccagatccgggcgctcacgctgccattgggcgagaatgcggtcaacggcatccgttggcggtaatttgtccatgcgtgctcacttgtcttgatatcaagatatttatcgttacatacttgctacacaatttaacttgatatgaagataaaatcatggccttttttactcgtcatctggcggtcgatctgctgctgaccgcgctggctcccgccatctggggaaccacctatatcgttacttcgcagttcctaccgccggaccgtccttttatcgccgcgttgttgcgcgtgttgcccgccgggattgcgttgttactgtggagccatcagtttccgcagcgcggcgagtggtggaagctgatcattaccggaatattaaatatcggcgcctttcaggcgctgctgtttatcgccgcctaccgcctgcccggcgggctggcggcggtgatcggcgcgattcagccgctgctggtgatgctgctggcctggtgcgtggatcgccagcgttcgccgtggctggcggtggtttccgcctgcgccgggatcatcggtatggcgatgttgctgctttctccgcgcacggtgctggattcgttaggtatcggcgccgcttttcttggcgccgtcagtatggcgctgggcacctggctgtcgcggcgctgggcgctatcgttgccggtcgtggcgatgaccggctggcaattgttgattggcgggatcgtgttactgcccatcgcgctgctggtggacccgccgttgcacaatatcactccattacaggctgcaggttatgtctggctgtgtgtggccggggcgatgttggcctatggtttatggttccgcggtatcagccgattgtcgccggtggcggtatcggcaatgagcctgctaagtccggtgacggcggtgctgctggggtgggtctttctcgggcagaaaattgaggggatggcgctggcgggccttattgtggtgctggcgagtgtgctctctattcagcgcgcgctggcgaaacgttgacgtgaaaaagcccataaagggctcgacattgccgtgtttttttacgtggcgggagccagaccagccgtcctgagacgacctgtccggcagctccctctgcgaccattcggttatttagacagttccgccgtcatgtgtacctgattaccggtataggcttcggtaatgtggtaagaggcgccctgatctttagcgatagcagcgatttttgcttctgcgttgtccagggtatcagaggtcacgctcaccgggtgagccgcgaagcttgcgaaagaaaccagagacagcataccagcagcagcaagtaattttacgtttttcatggtgtttatccttttaacttttatggtggaaagcgttgtgctttcgatgggtttataataagcatgctaactataacgtacgttgcaaaaagtgcgatttagatcacatttttatgacggtttgatgactgcatatggagtttttattgaaaaaaaactgtgaaaacagcacgttatatctcgtcttcgataatgctattttccgttgacccgcgtttaagcctcgccagaattttgcctgacattgattgcgtgaatgatttggtggttttttggcttgctgtgatggtgatacttcgcccgctggcgaagcattgatagccgtcggcgcgctacagtgcggcttcattcgttgctggaggaaaaaaccatgattgcggtactctttgaagcacaggtcacgccagcgcagcaggaacgatacctcgcgctggcggcgcagctgaaaccgctactggaaaccatcgacggctttatcgccatcgagcgttttcaaagcctcagtgcgccgggaaaaattttgtcgctgtcgtggtggcgggacgaacaggcggttgcagcctggaagcgcaatatttgtcatcaggcggcgcagcgggaagggcgggggtcgatctttgccgattatcagattcgcgtggtgcaggtaatgcgtgaataccagatgcagagtccgcgctctgtgtaaccaacattaagcggaggcgctatgctgcaccctgccgttataattgatgatgacgaagcgctggccgtcgcgatggcggcggttgcttcggcgatggctgacccttcacgagtgaaaatactctgcgcgctaatggatggccgggcgtggacggcgactgagctctccggcgcggcggatatttcgccgtcgaccgccagcgctcaccttagccgtctggtcaacagtcgcttactgatctgcctggcgcaagggcggcatcgctactatcgactggcgggcggcgatgtcgccggattgctggaaaatatgatgaccatggcgggcaaaagcgcagtgccgttggcgacccgtacgccgggaacgctgcgtatggcgcgtacctgctacgatcatctggcgggtgaggtggccgtcgccatctatgattttctgcagcaacaagcgtggcttacggcagatggcgcagcgcttaccgcggcgggggaggcgaatttcgcccgcttaggtatagcgtgtgatagcagatcccgccgcaaagcctgctgcgcctgcctcgactggagcgagcgccgtttgcatctgggcggagccgcgggcgctgccctgctccagtggggcgtgaaaaaaggttggttcacgctggtgcccggctaccgcgaagtgacaatcagcgagcctgggaagcgagcgatgcgtcagcactttggcctggcgctgtagacccggcgacgggatacccgttcagcagtgattcatattgacgatttgcttatgcatcacctgcgagctattcattcccagctttttcataatgtgaatgcgatggctgtgtaccgtcttatggtcgatattcaacagcgaggcaattcgcttgttgttattgcaggcgataataagttccagtacctgcagctctctggccgtcagctttcgctgcgtgcgtaaataccggggctgcggagtttcatcctgcgttctggtaattgctgaaaatgcgtccagagaagatttttccgtcaggattaacaggttttccagatcgattaattcccgacacagattggcgatatcgctttttaccatcagtaccaacaatgtacagcgcgaaaaatgaaagcgcagtttgttgagtaatactaccgtatcggcggcggatatatccttgtggatcatattgaagatcaccgtctcagccagggcgcaatgcccccttgcacgatgtcctgataactggcctgggtgatatcctgatgaatatcactcagataatcgtgaatagattggccaatgatattgtcgtcggtgtacagcaagatattgttcaagggcattaaactctcttcttacgcttggcttccagaatcaaatcgatcagcgttttttctattttcttcctgtcgtcactacggcggaacttaaactggcaggaaatctgatagtagttttccggactctttttttcgctatccagcgtgaccatcgccacgttcttgataaccagatcaacggtgatttcgccatattcagccagagacagaatggcgtttttcagcgttgagttgttggcaaggaatttcagatttggactttgcgcaatcagcgcgcagccgccatctgaaatatctttgatatcaaaagcatagttttcgccatttttatggcgcccatgacaaaagaaatcattctcatcgcgtaaacgaaatcgcggatctcgtcgtctttgtacaacctggatgcattccggtaacgcaaatgccaccttattgctattctccgcgccgccagcggaattcttctgccgctgggaggtgaactcgatctttcctgaatcgctatgcagaataaatttgaatttattccccgcagggattttgctatcgctctggatatggaattcggcaaaatctacacgtgcaatctgagtactgatgcttttgttattaaagaaaatttctatctctgtttgctttctctgttcctctctgaaaatagcaatgatttcatacttactggtttttatcgttccctctatcatgggcaatccttgttgaatcgttactgtgcatagttaattttttttacagcaatagcgacatactgattatgttaaccagatgtttttgtgaacgttcgatgatattgactatctttgtagccaaattgatttgtataaacgtcgaagccgatattgttttttcctgtaatcaagagtgttaacaaaaaccatggaacaatacaaacgacaacagcctcccaattaggaggcctaagaaataacgtaactcaatgcaatttataaggttattgcctgaattaggaatcagcaaaacccgatttgtaggatatatagtgccagcagagatggcctaattccagcttaatattaaggggataacccttcacgacaaacgccgtaagaggggagttgacgccatcagccgctgatgctatccagcttcgccagtgcctcggcgggagggtaagcgttgcggcggcgagattttcccgtaaatgcgccaccgatgaggtacccggaatcagcaaaatattcggcgagcgctgcagtagccacgccagcgcgacctgcatcggcgtggcgtcgagcatgacggcaacctcgttaagctcctgcgcctgtagcggcgtaaaaccacccagcgggaagaacggcacgtaggcgatgttttgctgtgccagcgcgtctatcagcgcgtcatcagcgcggttagcgatgttgtactggttctgcacgcatacgatggaggtcaacttctgcgcatcggcgacctgccgggcggtgacattgctcaggccgatgtgacgaatcagaccgcgggcttttagttccagtaaggtcgttagcggttcctccagcgaaccttccaccgggccgtgggtgccgagcatgctgcgcaaattgaccacctccagcctctccaggccgaggtttcgcaggttatcttctacggcctgggtgagttccgccggcgacatcgccggtagccagttgcctttttcatcacggcgggcgctgaccttggtgacgatacacaaatcatcgccatagggatgcagcgcctgccgaattagctgattggtgatatgcgggccgtagaaatctgatgtatcgatatggttcaccccggcggcgacggcttcttgcagaacgcgaatggcggcgtcaggatcttttggcggcccgaacacgccgggaccagcgagctgcatcgcgccgtatccaagccggtaaacctgacggtcgcctaaggtcatgaccccggataatgttacgttggacataatgactccctccgatgataggcaaggagtaagtgtaatcccgtcagggagaggtgatgggcgagaatgttggcagaacgtgcggcgacgctgagggcgtcgccgcgagagcgatttaactgaagaacatcaccgagacgcagagcaggccgacgattaaggtaatcagattacccagtgaacggtagggcttgagcgccgggataatgtacgtcgacagcgtcggcatgatgaacagaatcatggcgatcagcgggccgctgatggcgtaaatcattgaaatggcattcggattgataaagcagacgataaaggtcagcgccgagaccagcataattgacatcgcgcggttaaaggcgcggctcttacgaatgccgatctggccgagcgaggttttaacgatctcgctggcgccttcgatcaccccaaaataggtaccgaggaacgatttcgacatcgcgaccaccgcgacgataatgccggtcactgcaagccagcccggcgcgcccggcgccatggagagcgcagagagaatcgtcaccccttcattgcgcgcggcttcgatgtacggcagcggaatggacagcaggcaactgaagacaaaaaacagtacgctggcgcagatgatggtgtaggccaccttcatgatttttttgcatttacccatggccagctcaccatatttctcctgctgatcgatagcgaaggtcgaaataatcggcgtatggctaaaagcgaaaaccatcacgggaattgagatccagatttggtgccaggtctttgcgttcagctgcatctggctggtgagatgttccggttgccaactgccaatcaggtagatggagaggaacaggaaacagccaattagcgggaagacgaggaatcccatcactttgatggtcatatgacgccccatcaggaagatcagattcagtaccagcaccacggcaaggctcagtagggcgcgtacccctggggtcatcgccacgtgtctcgccagctgttccgccagtgaattggtgatcgccacggcatagatcaggatcaccacgaagaaggcgagaaagtacaggctggtgatcagattgccgacttttttgccgtagtaatgattgaccgcaccggtgatcccttcaccggccgccactttggccgacaggatgaattgacacagcgctttatgcggccaataggttaacggccaggcaaccagagcggtgaggaacagcacgatggcgccggccgaaccgagttgaatcggcaggaatagggtgccggcgcctacggcagtgccatatagagcaaaactccatagagtttcttctttagaccaaattttagacattatgcgaatttatcaaccgtataacccaaaaaaggagtgcaatttaccacatttatgaatcgtttgcggtgatagttttcggtgataaataaacccgcggatcgccaaagggttaggcgatccgcgcgatcgagaatgttaattattcggcagactctgcggctggcgatacttcaggacgcgtacgcgcagcgtatcccacgcccagttaaagaacatggtgtagggcaggaagaacagcataaagccgatttccagcataaatgcctgcaccagcgacacgccaagcaccagcgcgacgacggtgacgccgatgatgataaacccgcattcaaaaccgatggcgtgcagcgcgcgaacccgcagcgtacgcgccaggcgtgaaaccggccacagacggtcgaaggcggcgttatagatcaggttccaaatcatcgccatggtggcgagcagaatgctcaagccgcccatttcgaccaccgatcgctgcattaaccaggccgcggtcggggcaagaattaacgtggcgaggccttcaaagctcaccgcgtggagtacgcgttccagcagtgtcttacgctgcaggtgattggttttcattttgggatacctcttgtgagttctgtcatccagatttacccggcattttatggaaaaatgtgataaacaaaagatagattccatcgataaaatagataggttatgcactattctcctgaagccctcaccgcctttgtagaagccgccgccagcggttcgttctccgccgccgcccggcggatgcgtaaaagccagtccaccatcagtaccgcgatttcgaatcttgaaaccgacctggggttaactctgttcgatcgctccactcgccagccgacgctgaccgcgcagggcgagcaggtgctgggctatgtgaaagcaatactggccgccagttcgcgactggatgagctcgccagttcgttatcgggcaataccgaaccgcggttgaccttcgtcttgtcggataccctgcacccggatgtactggaggatttgctggaacagttcgatcggcgttttccgcataccgagtttgaatgtctgattggcgaagacgaagacgtggtggatctgctgcaaaaagagcgcgcgcaggtggggcttatcgaagccagggacagctatccgatggagatcggcagcatgcgcttgccgttgcaaacggccatggggatttatgttgcgccagggcatccgctggccggtcaggggcgggttttctgggatgatctgcacggttggcgtgaactacggcttagcacttatcttgagagcgcgccggatccttcgcgcggccaggtatggtcggcacccaactatttactgctgctgagtatggcggtgcagggctttggctggtgtattttgccctgcgcgctggtggaagagttcgccggtagcggcaagcttaaagcgttgaatatcgccggctggccgcggtcgatctcggtggatctgctgtggaacaagcgtacgccgttggggaagcgggcagctggctgcgccaacatcttgaagggcaaggccgcgagtcgtgacggcgaactttgtgaaccgcctcactttttttaaacaattgcgaaattttttgataacaattctctactataacggcatctattgatggttctttgcgcagaaggtaaaggatgaaagatgtcgtgatcgtcggcgcgttgcgtacgcccatcggctgttttcagggaacgctggcgcgtcactcggcggtggaattgggcagcgtggtggtgaaggcgctagtcgagcggagcggaatcgatccgcagtgcattgatgaagtgatcctcggtcaggtgttgaccgcgggcaccgggcagaatccggcgcgtcagtcggcgatccgcggcgggctgccgaataccgtttcggcgatcaccatcaacgacgtttgcggctccgggctgaaagcgctgcacctggcgactcaggctatacagtgcggcgaagcggatgtggtgattgccggcggccaggaaaacatgagccgcgcgccgcatgtgcttaccgatagccgaaccggcgcgcagctgggcaatagccagcttatcgacagcctggtgcatgatgggctgtgggacgctttcaatgattaccatatgggcgtaacggcggaaaatctggcgcgggagtatgggatcagccgtgaactacaggacgcctgggcgcttagctcgcagcaaaaagcgcggcgggcgatagactccgggcggtttcgcgatgaaatcgtgccggtcgccaccgagcataacggcagtaaacggctggtggataccgacgagcaaccgcggatggatgccagcgctgaagggttagccagcctgatgccgaccttcgaccagcttgggtcggtgaccgcgggtaatgcatcgagtattaacgatggcgcggcggcggtaatgatgatgagcgaatcaaaggcccaggagctggggctgccgattctggcgcgcattcgcgccttcgccagcgtcggcgtcgatccggcgctaatggggattgcgccggtacatgccacccggcgttgccttgagcgcgcgggctggcagctggatgaggttgatttaatcgaagccaatgaagcgtttgccgcccaggcgatttccgttggcagagtgctggagtgggatgaacgccgggttaacgtcaacggcggggccatcgccctgggccatccgattggcgcgtccggctgccgtattctggtgtcgttggtacatgaaatgattaagcgcgatgcgcgtaaagggctcgcgacgctgtgtatcggcggcggtcagggcgttgcgctggcggtggagcgcgcataatagggtttcgcgccttctccggcgcgatgtccaccatcctcgccgatcttcctttcttcgtttttctctctgattttctctcttcgtggttatttttcaaagataacctaacttactgtatttatagattttgtacaggttgctagttgctggcgatgtgatccgttttgcgttttcattatttttaattataaaaaatgaaacgttgttttaattgtcgttgaaaatgatttttccgcggtctaagatgtgaccattagcaaaacggaactctgttttatttttatgatggggatgttccaggagttcttcttaacctcagaaccttgcctgtggtgagcaggccgtgaaagaaaggaaccagatatgattcttgatgcattctctcttcaggggaaagtcgcggtagtgaccggctgcgacaccggtttaggccagggcatggcggtagggctggcggaagcgggctgcgatattgtcggcattaatatcgttgagccgacggaaaccattgagcgcgttaccgcgctggggcgtcgttttttaagcctcaccgccgacctgcggcagatagatggtattccgcagttgcttgagcgcgcggtggcggaatttggtcacatcgatattctggtcaataacgcggggcttatccgccgtcaggatgcgctcgaattcagcgagaaagactgggatgacgttatgaacctgaacatcaaaagcgtctttttcatgtctcaagccgcggcgaagcacttcatcgcccagggtaacggcggcaagatcattaatatcgcctccatgctgtcgttccagggcgggatccgcgtaccgtcctacaccgcctcgaaaagcggcgtcatgggcgtaactcgtctgctggcgaacgaatgggcgaagcataatatcaatgttaacgccattgcccccggctacatggcaaccaacaatacccagcagctgcgcgccgatgaacagcgcagcgcggaaattctcgaccgcatcccggccggtcgctggggcctgccgagcgatttaatggggccggtggtgtttctcgcctccagcgcatccgattacatcaacggctacaccgtggcggtagatggcggttggctggcgcgctaacagacttaagtcgaacaacccgctaaccgcgggttgttttctgaacaatgatcgtccatatcatgagatttaaataatccatactcgttagtaatggaaaataaaatactcgccatacatcagggttgttttgacgatcggacagcattttttgcataagataaagtttaatgtccatcacaaaaacaatgctaccagccgttttatccatatcttcgccatctcccgcctgacaccttagccctgcgatcccgtactttcactgcacgcatactctgttgaggcaggaaaaaaatgacttcattgaccaccgatccgggtttactccccaatgcgcagcgcaacacccggcgcatgaaccagtttgtctccattgccgccgcggtggcgggtttgttattcggccttgatatcggcgtgattgccggggcgctacctttcatcaccgatcatttcgtgttatccagccgtctgcaggagtgggtggtcagcagtatgatgcttggcgcggcgatcggcgcgctgttcaacggctggctctctttccgtcttggccgtaaatacagcttgatggttggcgcggtgctatttgtggcgggctcaatcggctcggcattcgccaccagcgtcgagatgctgttggcggcgcgtattgtccttggcgtcgccgtcggtatcgcttcctatactgcgccgctctatctttctgaaatggcgagtgaaaacgtgcgcggcaagatgatcagcatgtatcagttaatggtcacccttggcatcgtgctggcgttcttatccgatactgccttcagctacagcggcaactggcgggcgatgcttggcgtgctggcgctgccggcggtattgctgattatcctggtggtgttcctgccaaacagcccgcgctggctggcggaaaaaggccgccatatcgaggccgaagaagtgctgcgcatgttgcgcgatacctcggaaaaggcgcgcgatgagctgaatgaaattcgcgaaagtctgaagctcaagcaggggggctgggcgctgttcaaagtgaaccgcaacgtgcgtcgggcggtgttcctcggcatgttattgcaggcgatgcagcagtttaccggcatgaatatcatcatgtattacgcgccgcgaatcttcaaaatggccggctttaccaccaccgagcagcagatgatcgccacgctggtggtcggcctgaccttcatgttcgcgacctttatcgcggtgtttaccgttgataaggccgggcgtaaaccggcattgaaaatcggctttagcgtgatggcgttgggcaccctggtgctgggctactgcctgatgcagtttgataacggtaccgccggtagcggcctctcctggctatcggtggggatgaccatgatgtgtattgccggatacgcgatgagcgccgcgccggtagtgtggatcctctgctctgagatccagccgctgaaatgccgcgacttcggcatcacctgttcgaccaccaccaactgggtgtcgaacatgattattggcgcgaccttcctgacgctgctggacgcgattggcgctgcaggcacgttctggctctataccgcgctgaacgtggcgtttatcggcgtgaccttctggctgatcccggaaaccaaaaacgtgacgctggaacacatcgaacgcaagctgatgtccggggaaaagctgcgtaacatcggcaactgatcacacggattcgcgcggcagccacgggctgggaaccttaatggtatcccgatggctgtcgccgttaataatatgcagggcgctcaggcggccaatttcataatgcggcagctgcaccgttgacagcggcggcaggaacagatcgccaatacccaccatattgtcataacccaccaccgccacatcttcagggattcgcaagccctgcgccagcaacgtctggtagaccataaaagcaatgcgatcgttaccgcacaccacggaatcaaaccgcggtttaccctgatcaatatgggccagcagctggccgggaatatcgcgatagtgttcgtcaccgtaggtcatatagcagtggtcgagcgtatccggatcgacctgcgcctcacggcaggcgcgttccagcccctgtcggcggcgtatcgtcgccagatgcttggccggaagatgcaaacagagcgggcggcggtagccggcagccagcagcgctttcaccgcggcgtactgaccctgttcatcatccggaatatagctggcgatgttctcgttcaggctttcgcagttggccagcacgcagggcagcgtcaacaatttcgccggtagcggaacctggcgcagccccatggtggtgtaaatgatgccgtccgggcggtgggaaagcagaaggtcaaggatggcgtctggattgtcatccgagaacatgttgaccacaaagctgttccagccgtgggcccgcgctgtctcttcgatagagagcgttatctcaaccgagaaaggggtcgtcaccgtgtccagcgccagcacgccaatggtgctcggcgttgcccgggcgccgcgaattttctttgccgagaggtcggggacgtaattggtctgttcgatagccgcctggacgcgagcgagcatttccgccttcaggcgctccggactgttcagcgcgcgggataccgtcatcagtgagacattggctagcttcgctacatctttcagggatgccatggtgattactccggtatacaactaagtcgctgatgtaaaaggatcatacgatagtctatcccagcctgatggtgaagcatgacgaggaatagttgatcgcgatcgcatctccattatgttaacgttaacttttgtgattaacatcatgaatcgtcacaaaaccagatgagagttgttttttgttaacgttaccatttgcgcattactccaacacgagaatgtcatgatgaagacgcatcactctcacagctaccccttactcagtgccttactgtttttcttttttgttacctggtcttcttccggctcgctgctttccatctggctacatcaggaagtggggctgaaagccggggataccggcattatctacgcggtgctgtcggtctcggcgctattcgcccagatttgctatggctttatccaggataaactggggctgcgcaaaaacttactctggtatatcacggttttactgatcctttccggcccggcctatctgctgtttggctatctgctgaaaatcaacgtgctgcttggcagtatttttggcgggatctatatcggcctgacctttaacggcggcattggcgtgctggagtcctataccgagcgcgtggcgcggcaaagccagtttgaattcggcaaagcgcggatgtggggatcgctgggctgggcggtggcgacctttttcgccgggctgctgttcaacattaacccacagctgaacttcgccgtcgccagctgttccggcctggttttcttcatgttgctggcgcggcttaaggtctcttcagcgccgcacgccatgcaggaggcggtcagtggcggtaaagtcacgctggaagacgcgctgcgcctgctgacgctgccgcgattctgggcgctggtgtttttcgtcgttggcacctgtatttacggcgtttacgaccagcagttcccggtctacttctcctcgcagtttgccacgctccatgaagggaacgccatgtatggttatctcaactccttccaggtgttccttgaagcggcgggaatgttctgcgccccgtggctggtcaatcgtatcggcgcgaaaaacggcctgatcttcgccggcatggtgatggcgatgcgcatggtggcctccgggctggtggaaggcccggttctgatctcgattacgaaactgctgcacgccgtggaattgccggtgctgctggtttccatcttcaaatacaacagcctgaactttgataaacgcctttcttccaccctgtatctggtgggtttcgcctgcaccagttcggttatcgccaccgtactgtcgccactggcgggctatagctatgaaaaatacggcttcgccgactcctatctgatcatgggactgctggtgttctgcaccaccttcatctccatcttcctgctgcgatccaataaggcctcttcggattcgctcatgtcgcagccatccactatctgactgaaaagagaaatgaatatgatgtattccattagtaacgcggagcgggaactgcaggcgaaaagcgtggatctcaacccgcgctggtatccgcgttatcacctggcggcccgtgccggctggatcaacgaccccaacggactggtatggttcgacggctggtaccacgcgttttatcagcaccatccgtattcaaaccagtgggggccgatgcactggggccacgcgcgcagcaaggaccttgtgcattgggaacacctgccggtggcgctggcgccggaagggccggaagataaagacggctgtttttccggctcggcggtggttgatggcgatacgctggcgctcatctacaccggccataaatttcatggcgatcccgcggatgaaaataatctgtaccaggtgcagtgtctggcgaccagccgcgacggcatccattttgagcgccaggggatgatcattgataccccgccggggatgcaccattttcgcgatccgaaagtatggcgtgaaggtgaaagctggtacatggtagtcggcgcgcgggtagaggacgtcggccaggtgcggttgtaccgttccgccgacctgcgccactggcaggatgccggtattcttgcccaggccgaagcggggacgggctacatgtgggagtgcccggatttctttgaacttgatggcaagcgggtgctgatgttctcgccgcaggggatggccgcggacggctttgcacggcgcaatttattccagagcggctatctgctgggtgagtggcagccggggcaatcttttgtccgcgaagaggcgtttgtcgaactcgatagcggccacgatttctatgcgccgcaaagtttcctcacccccgatggccgacggattgtgatcggctggctggatatgtgggagtcgccgctgccggagcagcaggacggctgggccggtatgctgtcgctgccgcgcgagttaagcctcggcgctgataatcggctgttgatgcgcccggcaaaagaggtggaaggcctgcgccgcgactggttcccgtggccggtcagttcgttgaagaatcagcaactgacgatggtagagcattgtgaaaccatggaggtcaatttgcattgggatatggccaatagctgcgcagagcaatacggtttgagctttggcgaagggctgaaggtatatgtcgacaatcagatgcagcgtctggtactggagcgtcgctatccgcaatatggtttgtgcggcacgcgtagcgttccgttaccagccggttcggcgctgaagctgcggctatttttcgatagctcatccgtcgaggttttcgtcaatgacggagaagcctgcctcagcagccgtatttatcctgatacccggtgccgggaattagctttattttcctggagcggtagcgcggcattaattgatggcggagcatggaatctctaattaaatagtcattaatctgaataacccgcaagcaaacgccggcgggttatttaatattcaccaaaataataaaacaatacctttaatatataataagcagggtctaacgatgaataaaatctgggttggatgtcttatctcgtctttatttattcccgccgccgacgcgcagcaaacgctttctcttgaggagcgtctggcgcagatggagcagcgcttaaaagccaccgagcagcgggcagagaacgccgaagcggaaattcgcgaattgaagcatcaggagcgctcgatggctaaaagcagtgcacctgcgcccgcgacggttgccgcgcccgcgctggcggtgaataaagatgtcgatttaaaattttacggtgatgttgaatttaatatggatggcgccagtcgaaccggcagcctgacctcggtaaaaaccagcgcgaataagaactgggcgccgggggataaagagcgctgggatattaatgggcgtattttgttagggttcgatggcttacgcaaaggcgctaatggtaaatactccggctttagcgtacaaccgctggcggatatgaccggaaaaatgaatcttgatgatgccgtatttttctttggtcaggaaaatgactggaaaataaaagtggggcgctttgaagcctacgatatgttcccgctgaatcaggatacgtttattgaatattctggtaataccgccaacgatctctatagcgacggttacggttatatctatatgatgaaagaggggcgcgggcgtagcagcagcggcggtaatttcctgctgagcaaatacctcgataactggtactttgagctcaacacgctggtggaagacggtagctcgctgtttgtcgatcaaaactaccacggcaacacgctcgaaaatcataaaaacgtggtctatgtgcggccggtggcggcctggcagtccgggccgtggtcagtggcggcggcggtagagagcaacctggtgaataatgcctatggttatcaaaaccagaacggacgctgggtcgatcagtccagccgtaccggctacggtctgaccatgagctggaatacgcttaaaaccgatgccgaggatggcatggtggtgaacctcagcaccgcttatctggacgcggcggatgaagaggatttcagcgccggtatcaacgcgctgtggcatcgcgtcgagctgggatatatctacgcgcacaacaaaattgaccagtttaatatggcgggcgtcagcggcgagtgcgatggcgactgcgcgattctgacgccgggccgctatgacatccacacgatccatgcctcctggcaactgccgaatatcatggatatgccgaactttaatatttacctcggcgcctatgcctcatggctggattcgtcggcccagcaaagcgggaacgacgacgaacgctacggcgcgcgcgtgcgctttaaatatttcttctgatggggtcgccgcccaacagcaatagtggaaagttatcggcaggtttgcttcactggagcaaaccataaaggagcagataatgaaaaccatcggcctgctgggcggcatgagctgggaatccaccattccctattaccggttaattaatgaaggcattaaagcgcggctcggcggcctgcattccgccagcctgttgctacatagcgttgattttcatgagattgaagcctgccagtcggcaggggagtgggatcgcgccggcgagatcctcgccgcggcggcgctggggctacagcaggccggcgccgagggcatcgtgctgtgcaccaacaccatgcataaggtggctgaggcgattgaagcccgctgcgaggtgccgttcttgcatatcgccgacgccaccggacgggctatcagcgctaaaggccagcgtcgggtcgcgctattgggcacccgctacaccatggagcaggatttttatcgcggccgtctacagcagcagtttgccgttgagacgctgatcccgcaggctgacgatcgggcacgcatcaatcaaattatttttgatgagctatgcctcggcacctttagcgacgcctcgcgcgactattatctgcaggtcatcgaggcgctggcggcgcaggggcggaaggcgttatcttcggctgcaccgaaatcggcctgctggtaccggaaacgagtagtccgctgccggtatttgataccgcggcgatccatgccgccgacgcggtggaatttatgctctcttaagtaccgccgccagcggctgttcgatacgcggcaggctggtttgcagatgctggacaaaggcgtcgaccagcgcggaaccggggcgatgtagcgggcggattaggctgacggtaaagggcacatcgacgctgaagcgccgcaccaccacgccgctctcagcgtagtcgagggcggtaagcgggttgaccaccgaaatgcccgctccggcgcgcaccatcgcgcagatcgacgccgcactgtgggtttcaaccaccatccgtcgttttacctggtgctccataaacagcgtatcaagaagctggcggtagctgtcggtgcgcgacaggctgatatagttttcaccgtggaaatcggcgggggtgagttcggttttagcggccagcgggtgatcctgtggcagcacgcagacttcatttaaggtcagcagcggcatgcgctcggtgccggccggcgtatgcagcgtttccgttaaccctaaatcgtgacgctgggccgataaccattcctccagcagcggcgactcctgcggcacgatctgcaggctgacgtccggatagcgcgccaggaacggctgtagcagtagcggcagaaatgactgcgaaaagaccggcagacaggccaccgacagttccccctggcggaattcgcgcaggctttccgcggcgctaacgatgcgatccaggccataccacgagcgctgtacttcttcaaacagccgcagccctggaccgtcggctgcagacggccgcgggcgcgctcaaacagctttaagcccagcactttctcaaaacgcgccagttcacggctgaccgtcggctgcgaggtgtgcagcatccgtgccgcttcggtcagattgccggtggtcatgaccgcatggaaaatctcgatatggcgtaagttgacggctggcatgggcagctcccggttagcatcagatagccatatcatttttgcatagactcgtgacaaaacgatattttttattctcttcacgctgtggcgtaatcggaaaaaacatcgacaaacacacgtacgcaccggagtccttatgccacgctcgctgaacgccaccgataccgatctgaccgccgacaatctactgcgcctgcccgctgagttcggttgcccggtatgggtctatgacgcgcagattatccgccgccagattgcccaacttggccagtttgacgtagtgcgttttgcgcagaaggcctgctccaatattcatattctgcgtctgatgcgcgagcagggcgttaaggtggattcggtgtcgcttggcgagatcgaacgcgcgctggcggcaggttacgatcccgtgcagcatccggatgatatcgtctttaccgccgatctgatcgatcgcgcgactcttgagcgagtgaaggcgttacagatcccggtgaatgccggatccgtggatatgcttagccaactgggcgaagtgtcgccgggccaccgcgtctggttgcgcgtcaacccgggatttggtcatggccacagccagaagaccaataccggcggcgaaaacagcaaacacggtatctggttcagccagctgccgcaggcgctggaggtgattcgccgccattcactgcagctggtcggcatccatatgcatattggctccggcgttgattacggccatcttgagcaagtatgcggcgcgatggtgcgccaggtggtggagtttggtcaggatctacaggcgatctccgccggcggcggattatcgattccgtatcacgaaggcgaagaggcgatcgataccgatcactactttggtctgtggaatgcagcgcgcgagcagatcgccaaacatttggggcatccggtgaagctggagatcgaaccggggcgtttcctggtggcggagtccggggtgctggtatcacaggtgcgtagcgtgaaagagatgggcagccgccacttcgtactaatcgacgccggctttaacgatctgatgcgcccggccatgtacggcagctatcatcatattaccgcgctggcagcggacgggcgcgacctgagcggcgaaccgctgctggaaaccgtggtcgcggggccgctgtgcgaatcgggcgacgtctttacccagcaggagggcgggaaagtggaaactcgcctactgccagcggtggcgccgggcgattacctggtgctgcacgacaccggcgcctacggcgcatcaatgtcttcaaactacaacagccgtccgctactaccggaggtgctgtttgataatggcagcgcgcgcctgattcgccgccgccagaccattgaagaactgctggcgctggagcttatttaaagaatggccccgtcgtcaccgattcacgcagcaccagcgtaccggtgaacggcgggatagtttcgattggctgttcgttggcaagcttaatcgcctggtcgatggcggtggtgatcatattgtcgataggcaggtagaccgtcgataatcccggctccagccacttcgcgctgggggcgtcgtcaaagccgaaaagcgatatatcctgcggaatacgcaaccccgcctgatgcagcgccttcgaggcgcccaatgccatatcatcgttacaggagaagagcgcgctaaacggcgttttctcttctaataattcccgacacagctcataaccgcgggtcatcgttgaatcgccgtactttatccgcgccggttcccacgcaattccatgcttttccagggcgctgcggtagcccgccaggcgcgctttacccgttggggtatgcattggcacggtcaggcaggcgatatcgcggtgtccctgggaaatcagatagtcgacggcctgaaacgccgcctcctgctgttcaaagaacacgcagcgttcccgcgcctggctaacgtcgcggttaatcaccaccagcggcgtttcaatggtctcgataagcgacatgattttctgttcgctcatatgacgggtgtagagcacgatggcgtcacactgacggtcggccaacatttgtaccgcttcttcctcccgctcgggcgcatcgtggccgtcggtgacgataagctgtttgccccaggcttccgtttggcgcgatgcctgttgcagtaagcggccaaagtaaaaaccgtcgaatgtcgataccaccagtccaatgctgttgctggtacgattcgccagcgagcgggcgagaaaattaggccggtagcccagctcttccatcgctttgaatacctgttggcgggtactctcttttacctgacctgtgccgttcaacacgcgggaaaccgtcgctttcgagacgcctgcgcgtattgagacatccagcattgttgccattcgtcgattcctgataacccgtgattgggcgcagtttaccacagtcattcagagggatatgagcctgacgacggcaaagactatcgcgatcacgctttttgcggaaatcctgttgaaggcattttccgagccatgatgcgcgggcgcgagcggcgcgctagaattcatcgattcacaggggaaaaaatgcagattcaaccgttgtacgccgcgccgcagcatgggccgcaggtggcggagtggctatggcaggcttttgccggcgatgccttaccgcaggcgttttttagcagtattgttgaacatagccaaacaccgggggcgctgccgctgacctttatcgccaccgatggcgaggcgctgctgggtaccgtgggctgtggcgttgcgatttgataagccgtcaggatctgtttccatggatggcggcgctgtttgtcgccgaaacggcgcgcgggcaggggctggccgggaagctgcagcggcacgtcatcgactatgcccgccagtgcggttatccgcagctttatctctattccgcctgccgcgatttttatgagcgctttggctggcgctatatcggcgagggcctggattacccggccaccgccgtgagcctgtaccgctacgatttatcgccttccgcgggcgttatcaccgagtgacggcgaaccagcgtcgggctgaagaggtgagtgatttccggcgccgggcgctgttccgccaatgccagggccagctccgccgcctgggtcgccatggtgacgatcggataacggacggtggtcaggcgggggcgcacgtagcgggagatcagcacatcatcgaagccaatcagcgaaatttcctgcggcacctcgataccattatcgttgagcacccccatcgcgccggcagccattgaatcgttgtaacaggcgacggcggtaaagtttctgccgcggcctaatagctcggtcatcgccagttcgccgccgctttcgtcaggctcggcgaaggtgaccagccggtcattgacggccagaccgctctctttcagggcatcgtaataaccttgcagccggtcttcggcatcggaaatcgcgtggttggagcagatatagccaatgcggctgtggccctgctgaatcagatgacgcgtcgccagccaggcgccgtagcggtcatcgagcgccacgctgcgctgctcgaaaccgggaacgatgcggttaattaacaccatgccgggatctgtttcattagccccgccagctcgtcgtcggggatcattttagcgtgcaccaccaacgccgcgcagcggtggcgaataagttgttcgatcgcctgacgttccttttgcacgttgtggtagccgttgccgatgagcagaaaattaccggtgctgtaggccacctgttcgacggctttgaccatcgcgccgaagaagggatcggaaacgtcgcccaccaccaggccgatggtttccgttgactgctgcgccagcgcgcgggcgttggcgttggggtggtagttcagggactccatcgccgccgtcaccgactgacgagaggcttcactcgcttttggcgaattgttgataacgcgtgagacggtagcgacggacactcctgcgagtcgggctacatccttaattgtcgccataccggaccttttttagggtaagcgtttacataatagttatgttacgggaaagcgcagcggattcaaggctacggccatcccggttgatacaaatgtgacgcagacaaagattagtagtgacaaagttacacagcacaaggcgtgggatgcaacggtgaaaagagaattctcatctttgcttacactttgcgattagctgttgcgaatgttcgctggtttcgttgagtgatggattgatactctggctatcccagaggtattgataggtggagtcaacgtcacgttgaccacttaattacaccaacctgcgcagatgcgcaggtttttttttgcctgttattcaggctgttacagatagcgaaaatcgtaatacctggttgcacttaggctcattcccttgcgttttcgcgctggcgcgatcgcgggtaaaaacgcgacaatcagggtcccagaggtattgattggtgagtttcttaagtacgcacttcgtactgattatcttgcaccggcctgcgcggatgcgcaggttttttttattctgaattttattcccccacactgcttttccccgccttctcatgtaacctgctcggaatactaaatcagccacgcggagtcgttatgctgttgggtttttttcgattactgttcaaaggattgtaccgggtacgattgaccggagacacccaggcgctttatcaggaaaaagtattaattacgccaaatcatgtctcatttctcgacggtattttactggcgctctttctgcccgttcgaccggtatttgctgtctatacctcaattagccagcgctggtttatgcgggcgctgacgccgcttatcgactttgttccgctggatcccaccaaaccgatgtcaattaagcatctggtgcgcctgattgagcagggacgcccggtggttatcttcccggaagggcgtatttcggtcagcggttcgctgatgaaaatctatgacggcgcggcgttcgtggcggcgaagtcgaaagcgaccattgtgccgctgcgaatcgaaggcgccgaacttacgccattcagccgcctgaaggggctggtaaaacgccgcctgttcccgcgtattcagctccatttactgccgccgacgcatctgccgatgccggaggcgccgcgcgcccgcgatcggcgaaaaatcgccggcgaaatgctgcaccagattatgatggaagcgcgcatggcggtgcggccgcgtgaaacgctgtatgagtcgctactggcggcgcaggaccgcttcggcgcgcgcaaaaactgcgtggaagatattaatttccagccggatacctaccgtaaactgttgaccaaaacgctgtttgtcgcgcgtattctggaaaaatacagcgcgcagggcgagaaaatcggcctgatgctgcctaacgccggtatcagcgcggcggtgattttcggcgcgattgcccgcgggcgaatcccggcaatgatgaactataccgctggcgtcaaaggactcagcagcgcgattaccgccgcggaaatcaaaaccatttttacctcccgtaccttcctcgataagggcaaactctggcacctgcctgagcagttgactcaggtgcgctgggtgtttctggaagatctgaaaggcgatgtcaccactgccgacaagctgtggatatttggtcatctgctggcgccgcgtctggcgcaggtcaagcagcagccggaagatgcggcgatgatcctctttacctccggctcggaggggaatccaaaaggggtggtgcatagccataaaagtctgctggctaacgtggaacagattaaaaccatcgccgattttaccgccaacgaccgctttatgtcggcgctaccgctattccactccttcggactgacggttggcctgctgacgccgctattcaccggggcggaagtgttcctctatccaagcccgctgcactatcgggtggtgccggagctggtctacgatcgtaactgtaccgttttgttcggcacctcaaccttcctggcaaactatgcccgctttgccaacccgtatgatttttatcgtctgcgttatgtggtggcaggggcggaaaaactgcaggacagcaccaaacagctgtggcaggacaaattcggtctgcgcatccttgaaggctacggcgtgaccgaatgcgcgccggtggtctccatcaacgtcccgatggcggcgaaagtcggcaccgtcgggcgcattcttccggggatggatgcccgattgctggcgatgccgggcatcgaacagggaggcaggctgcagttaaaagggcctaacatcatgaaaggctatctgcgggtagaaaaccccggcgtgctggaagcgccgacggcggaaaaccagtacggtgaagtggagagcggctggtacgacaccggcgatatcgtcgtctttgacgaacagggctacgtccgcattcagggccgcgccaagcgcttcgccaaaatcgccggcgagatggtctcgctggagatggtcgagcaggtcgctttggcggtctcgccagacaaaatgcacgccacggccattaagcaggacgccagcaaaggcgaggcgctggtgctgtttaccaccgataatgaactcaatcgcgaaaagctgctgcgctacgcacgtgaacatggcgtaccggaactggcagtgccgcgcgatattcgttggctgaaacagctgccggtactgggcagcggcaagccggactttgtcaccctgaaaggcatggtagaagaggcggaacattcaaatgagtgagtcagtgcacactaacgcttcactgtactcgaaagggatgatggcggtgatctgcgcccaattcctgtcggccttcggcgataatgcgttgctgttcgccaccctggcgctgatgaaacagctctactatccggagtggagccagccggtgttgcagatgttgtttgtgggcgcttacattctctttgcgccatttgtcgggcagtttgccgatagcttcgccaaaggccgggtgatgatggtcgctaacggcctgaagctgctcggcgccggatgtatttgctttggcgtcaatccgtttatcggctatacgctggtgggtattggcgcggcggcctattcaccggcgaagtacggtattctgggcgaactgaccaccggcgataagttagtgaaggctaacgggctgatggagtcgtcgaccattgcggctatcctgctggggtcaatggcgggcggcattcttgcggactggcacgttctggcggcgcttatcgtttgtgcgctggtttatggcggcgcggtggtcgctaacctgtggatcccaaagctaccggcggcccgtcctgggcagtcgtggcgtttcaggccgatgaccaatagcttcttcagcgcctgtaaaacgttatggcgtaatagcgaaacgcgtttctcgttgatggggaccagcttgttttggggggcgggggtgacgctgcgcttcctgctggtgatttgggtaccggtggcgcttgggatcaccagcaacgcgatgccgacctacctcaatgcgatggtcgccgtcgggattgtggttggcgctggcgcggcagcgaagctggtaacactggaaaccgtctcgcgctgtatgcccgccgggatattgattggcgtcgcggtgattgccttcgcggtgcagcagtcgctattgccagcatttggcctactgctactgctcggtgtatgcggcggcttctttatcgtgccgctgaacgcgctgctgcaggagcgcgggaaacataccgttggtgcaggcaacgccattgcggtgcagaacctcggtgaaaacgtggcgatgctgctcatgctggggctgtactcgctggcggtcagcgttgggatcccgccggttggcgtggggattgggtttggcgcggtctttgcgctagctatcgccgcattgtggtggtggggacggcgtaaataatccccggcttgcgctgcgcttagccgggctaccgaactaccgaaggtcgcgggttgtgtagcccgggtaaggcgttagccggcacccggggtttttactctcttacggcgccgggtaggtatacaccttatgcaccgcttcaatctccgctaacacctcttcgctcagctcaagatgcaaactttcgacgttggtcttgagctgctccatggtcgtggccccgagcagggtgctggcgacaaacggctggcgacgcacaaaggccaacgccatttgcgccggatcgagattgtggcgtttggcaatgtccacataagcggccaccgctttctgcgcctgctcgccgctgtagcgggtaaagcggctgaatagcgtattgcgggcgccagccggctgcgcgccgttgaggtacttaccggttagcgtaccgaacgccaggcatgaatacgccagcagctctacgccctcatattggctcacttccgccagccccacttcgtagctgcggttaagcaggctgtacgggttttgaatcgtgacgatgcgcggtaggtcgtgcttatcggccagatgcagatagcgcatgacgccaaaagcggtttcgttagagacgccgatatagcgaattttcccggcgcgctggaattcggtgagggcttccagcgtatcgagcagggtgaccaccggcgcggagtcgctccaggtatagcccagcttgccgaaacagttagtctggcgctgtggccaatgtacctgatagaggtcgagataatcggtttgcagacgcttaaggctgtcgtgcagcgcgtcgcgaatgtttttgcgatccagcgcgtggtttgggcgaatgctgctgtcgttattgcgcgccgggccgctgactttagaggcgataaccagcttttcgcggttgccgcgtttcgccagccagttgccgacgtaggtttcggtcagaccctgggtttccgggcgcggcgggacaggatacatttcggcgacatcaatcaggttaattccctgacttacggcgtagtcgagctgttcatgagcgtcggcctcgctattttgttcaccaaacgtcattgtgcccagccctagcgtgctgatttcaagagaactgtgtgggatacggtgatactgcatagccggcttccttatttttatcaacaaggtcaggagtttcccgacaaaactatctccccacaaacttcaaagcgcttgcaggctgatgggaataacaacatggcagagggagagaaaaagagaaagggaaaatatcaaaaaagccgggtctggagatcctgaagggggttgccctggggatatagcagggggatcccgactcttttctgtggctgtggttgtcggaaattatgcttttaaccgacgaaaaagcttaacgcttaataatttgtgacacgtcgtcgcggttgatctgcattttattgccttgctgatcttcgtagcttatcaaaccggtatcatcgtcaaccgccggtttaccgtcggtaagaatcatacgtccgtcttttgtcgccatgacataatcgctgctgcaaccggaaaccgagaacgccagtcctacggcggaaatcaatactgcccattttttcatcgtcattacctcacttatggccgcacctcgtaccagtatattaatagcctgatttgtgagacataaaaagcagtaaagtcttaaaaagaattgcagcccgcttccggactgcaattttgtggcttatagcgggtttttcttattgcgcatcaggttgagagtttcgaccgcaatggagaagaacatcgcgaagtagatgtaacctttcggcacatgcacatcgaagctctccagcatcagggtgaaaccgaccaggatcagaaacgacaacgccaacattttgaccgacgggtgacggtcaacgaagtcgccgatcggacgtgcggcaaacatcattaccccaaccgcaatcaccaccgcggccatcataatgaacagatgatcggagaggccgacggcggtgatgactgaatcaaggctgaagatgatatccagcagcatgatctgtacgatggcgccaaagaaggattggacgttggttttaagaccttcttcctcgccttcgatcgattcgtggatctctttactcgctttccagatcaagaacaaaccgccgagcagcaggatcaggtcgcgaaacgagatctcctgaccgaatacggtgaagagtggattggtgagcttaacgacccaggcgatagacgccagcaggccgagacgcatcagcattgctcccattaacccgatacgccgcgcatgggcgcgttgggcggtgggcaacttagcgacaaccagagagagaaaaataatattatcgatcccgagaacgatctccagcagcgtcagcgtgccgagcgccagccaggcgttaggatcggttatccatgcaaataacattgttcaaagtcctgcaaaaaataaagtcgtaattatatgcaggcgttgcggcagaacaaaaaattattcatgtcctaatagaaaatgacgcgccagcagtgcggcggtaaagttctttttcagataaaagccgcgcggcaaagtgaggattggctcgccatgggcgccgattgcttccgttagcgccttgctgttggccgctttagggcgcagttgcaatacctcgccgtggcgggcggtgatgcgttcaacctggccgagtacgatcaaatccatcaactcttcccagtccatgcgcagctggcgatcttcatcctcgtctggcgtccataagagcggcgcgccgacgcggcgttgcgcgagcggaatctcgcgttcgccttctaccgggatccacagtacgcgctgtagcttatgccgcacgtggctgctttcccaggtcacgccgctattgccggttagcggcgccacgcaaacaaacgtggtctccagaggacggccctgacggtcaatggggatggttttcagctccacgcctaaggcggcgaaatcctgctcgggtttgctcccggcgctggcgcccagccaaatttccagcagaatgccaatccagcctttatcgcgtttcaaatctcggggaatggggatccccgccagcgccgccagttccccagtgaataacccgccagccgctgggcctgagcaagaagttgctcctgactttgcggcggaacggtgagcggagcgatggctggcatgatgggaaacctctgattaaaaagtgagcgctaattttgtgcgttgtggatagagtttacctttttatgggtaactataccaatatgatgatttatatatggtttttgtcttttatttccacttgtgaaaacagtgaaaacgggttttccagaactggtcactgacaatgaacaggatcttacaccatgttatccacagaaaaatgggataactggggaaaagccccactactggttcgatttacagccttgacgtgcgacgaaaatcgaatttttagacaaaatgtgcccgacgagtgtgctttatctgtggataaaagcggcattgttcgatctttcatcagttgccggatcgcatatgtgatgatcatcacgttatgctgtaatttgtctgcgtgaagtatgataacttaatgaatagtatgtcattattagacggcctcatctctacgtcgttcggactactctgggttttccctggttaattccgtacttcttcacaactctatccacagaaaaagtgaataaaatggcccggagatggcgttcactgtttataactcgggtgattactgtgagttattcaaatgttattcgttatcacgccacacagagagtggtttaccgtttccaacgagtgtgaaacaatcattcacattgaagcttattttgaggtagtccggtgattgatgacgatggctaccgcccaaatgtcggcattgtaatctgtaaccgccagggccaggtgatgtgggcccggcgctatggtcagcactcgtggcagttcccgcaagggggcattaatccaggtgagtccgccgagcaggcaatgtatcgggaattgttcgaagaggttgggttaagccgcaaagatgtgcggatcctggcctcaacccgtaactggctgcgttacaagctgcctaaacgtttggtgcgttgggacacaaagccggtttgtatcggtcagaagcagaagtggtttcttctacaactggtcggcagcgatacggcaattaatatgcaaaccagcagtacacctgagtttgatggctggcgatgggtaagttactggtacccggttcgtcaggtggtgtcgtttaagcgcgacgtttaccgccgggtgatgaaagagttcgcgggcgtcacgatgtcgcttgctgaaaccacaccaaagccacaaagcgcgcctgcttatcgacgtaaaagaggttaagccacgcacattatgctcactcggttgcgagaaatagtcgagaaggtcgccagcgcgccgcgtttaaatgaggcgcttgatatcctcgttacggatgtctgtaaagcgatggaaacggaagtctgttcggtttacctggctgacaacgatcggcgctgctattacctgatggccacgcgcgggctgaaaaaaccccgcgggcgcacagtcgcactcgcatttgatgaaggtcttgtcggcctggtggggcggctggccgaaccgatcaacctggccgatgcgcagaagcatcccagctttaaatacataccggctgttaaggaggagcgtttccgcgccttccttggtgtgccgatcatccagcggcgtcagctgctgggtgtgctggtagtccagcagcgtgagctgcgccagttcgatgaaagcgaagagtctttccttgtcaccctcgccacccagatggccgcgattctctcccaatcgcagttaaatgcgctgtttgggcagtatcgtcagacccgcatccgcgcgctgccggcatcatccggggtggcgattgccgaaggctggatggatgccagcctgccgttgatggagcaggtctacgaggcttcgacgctggacaccgcttccgagcgcgaacgtctcaccggcgcgctggaagaagcggcgaatgagtttcgtcgctacagcaaacgctacgccgccggggcgcaaaaagagacggcggccatctttgatctttattcacacctgctatccgatgcgcgcctgcgccgtgagctattcgatgaagtcgacaaaggctccgtcgctgaatgggcggtgaaaaaggtcattgaaaaatttgccgagcagtttgccgcgctcagcgatggctatctgaaagagcgggcgggggatttacgtactctcggacagcggctgttgtttcatctcgacgacaccacccaggggccgaatacctggcctgagcgcattattctggtggccgacgaactatcggctaccacgcttgcggaagtgccgcaggaccgcttagtcggggtggtggtgcgtgatggcgcggccaactcccacgcagcgatcatggtgcgcgcgctgggcatcccgacggtgatgggcgccgatattcagccgtcgctgctgcatggccatatgctgatcgttgatggctatcgcggcgatctattggtcgatcccgaaccggtgctgctacaggagtatcagcggttaatcagcgaagagaacgagctgagccggctggcggaagacgatctcgaacgcgcttccgagctgaaaagcggcgaacgggtaaaagtgatgctcaacgccggcctgagcccggagcatgaagagaaactcggcagctttatcgatggtatcgggctttaccgcaccgaaattccgtttatgttgcaaagcggcttcccttccgaagaggagcaagtcgcccagtatcagggcatgctgcagatgtttaacagcaagcctgtaaccctgcgtacgctggatatcggcgccgataagcaactgccgtatatgccgattagcgaagagaatccgtgccttggctggcgcgggatccgtattacgctcgatcagccagagatcttcttgatccaggtgcgcgccatgctgcgcgccaatgccgccactggcaacctcagcatcctgctgccgatggtcaccagcctcgaagaagttgacgaagcccgccgcctgattgagcgcgccagccgtgaagtcgaagagatgattggttacgctattccgcgcccgcgccttggggtgatgctggaagtgccgtcaatggtctttatgctgccgcagttggcaaaccgcatcgactttatctcggtcggcaccaacgacctgacgcaatacatcctcgcggtcgaccgcaataatacccgcgtcgccaatatgtacgactgcctgcatcctgcggtattgcgggcgctggcgatgatcgcccatgatgccgagcgttttggtatcgatctgcgcctgtgcggtgaaatggccggcgacccgatgtgcgtcaccatcctggtaggactcggctatcgccatttgtcgatgaacggccgttcggtcgcgcgcgtgaaatatctgctgcgccgtattgatatcgaagaagcgcaggagctgtcacggcgcagtctggaagcgcagatgaccaccgaagtgcgccaccaggtggcggcgtttatggagcgccgcggtctcggcggcctgatccgcggcggacggtaacgtagatcgggtaaggcattagccgccacccgacaaataacggcaccgcgtagcgagcccggggaaaaaccgcacgctgttagcatccgtatacatatcttttacacgttcagcgcggatcgcattacatgcttatgctatcattcgcctccttcggagtgcccgttttaagcgggcacggatcatcaccgctgtccactttcggcggaataacaagtctttatggtgacagatgaatagtggctacctgcattttccggagttcgatccggtaatattttccattggaccggtctctctccactggtacggcttaatgtacctggttggtttcgtctttgcgatgtggctggccacccgtcgggctaatcgtccgggcagcggctggacgaaaaatgaagttgaaaacctgctctacgcggggttcctcggcgtattcctcggcggccgtatcggctatgtgatgttctacaacctgccggttttccttagcgacccgctatatctgttccgcgtctgggatggtggcatgtcgttccacggcggcctgatcggcgtgattctggtgatgattatcttcgccaaacgcaccaagcgcaccttcttccaggtttccgatttcattgcgccgctgatcccgtttggcctcggcgccgggcgtctgggcaactttatcaacggtgaactgtggggccgtgttgacccgaacttccattacgcgatgattttcccgggctcgcgcgctgaggacctggcgctactgccgtcgcacccggaatggcaatcattattcgatacctacggcgcgctgccgcgtcacgcttcgcagctttatgagctggcgctggaaggcgtggtgctgttcctgatcctgaacctgtttatccgtaaaccgcgcccgaccggttccgtttccggcctgttcctgattggctacggcctgttccgcattatcgtggaattcttccgtcagccggacgcgcagtttaccggcggctgggtgcagtacatcagtatggggcagattctttcgatcccgatggtgcttgcgggtatcattatgatggtttgggcttatcgtcaccgtccgcagcaacaaaactcttgaggaaccatgaaacagtatcttgatttgatgcagaaagtgctcgccgagggcacgccaaaaaatgaccgcaccggcactggcaccatctctatcttcggccaccagatgcgttttaacctgcaggaaggcttcccgctggtgaccaccaagcgctgtcatttacgctccatcatccatgaactgctgtggttcctgcagggcgacaccaacattgcctatctgcacgaaaataacgtcacaatctgggacgagtgggcggatgaaaatggcgatctggggccggtctacggcaaacagtggcgttcctggcccgcgccggatggccgccatatcgaccagatcagcacggtcatggaacagctgaaaaatgacccggactcccgtcgcatcatcgtgtcggcatggaacgtcggcgagctggataaaatggcgctggcgccgtgccacgcgttcttccagttctacgtcgccgacggcaagctctcctgccagctgtatcagcgctcctgcgacgtgttcctcggcctgccgttcaacatcgccagctatgcgctgctggtgcatatggtggcgcagcagtgcgatctggaagtgggcgattttgtctggacaggcggcgacactcacctgtatagcaatcacctggagcagaccaacctgcagctgagccgcgaaccgcgtcctctaccgaagctggtcattaagcgcaaaccggcgtcgattttcgactaccgttttgaagatttcgaaattgaaggttatgacccgcatccgggaattaaagcgcctgtggcgatttaacgtctctgtagtgatgacaaaccggcgccagcagcgccggtttttttatgccctttgcagaattttgcgagcctgattcctgacgccgctcaacatcctgcaactggcgaattttttcccgagccgcgacgcgaaccgtagatttgctattcgaattgatggtcagagcaacgcatactcggcgccatgaacagacagcatggctacaccctaattgaaatgctgatcgccatgatgctggtggtcatcctcagcgccagtggtatgtacggctggcagcgctggcaacagcaacagcgcctgtggcaggtcgcctgccaggtgcgcgattatctcgtgctgctgcgcgatgacgctaactggcacaaccgcgagcgcgtcattagcgtcggacaatcgcccaccggctggtgcctgagcgcaagcggcgtggaggctgaatgtcacgcgaaaacgccttttaccctgcagccgctatggccgggaattaccttgcggcacctgacggcgggaatcggcttctacggcctgcgcaacagcgcctgggccggccatatcctgctgcaaagcgatggcggagcgtggcggattgttgtctctaactgggggcgcatacgcctgtgccgggaaggagaggaattatgccagtagtagagcgcggctttacgctcatcgaaacgctaatcgccatggcgataggttctgtgttactgctgggggccgctcgtttccttccggcgctacagcgccaggttcttagccaaacgcagcagcaggcgctggaaaatgagctatggcagcgggtctatgcgttagccaaacatttgcagcgcgccggatattgcgcaggtcactgtcatggtcaggcgctggtgattgccagcggcgggcagtgcgtaatcgttcgctgggatggcaacagcaacggcatttgggaactggcgccggaggccgatgccgattccaccggttttcgcctgcacgacggagcgctggaaacgcggcgcggcgtcgctgactgcggcggtaaaaattgggagaaaatgaccaatcccgccgctctcacggtcacgcgctttcacgttgagcggcaggcgataagcgggttttctcctgaacttatcgttaccctggggcgcaggcgcaatcggactcgcgtatttccgccgaggcgcaatatcgggtgacggggttcaacctgtgaaacgccagcgcggagtttcatcgctgctgatggtgctgctgttactggcgctgggcagcctgctgttgcaggggatgaatcagcagcagcgatctctgctggcgcagatgagcgccgaaacccaggcgattcgcgatacggccgccgcgcagtcggcgttgcagtggggcaaaggggtgaactggccgttgcagagcgatgtggtgtgtcagcaggaaaacagccaacgctggcgcgcgtgcctgcggcattttaatgatggccgcgcgctgcttatcgccggcagcggtacagtacagctgtggcagtcagcgtgggttgaacagggcgcgttgcgctatttagcgcatggctggagcgacttttgcccgttgaaggagagtgcgtcatgcatgatgccgtagcgcgccagcgcggttttagcctggcggagacattattagcgatggcgctgttaatcatgaccatcacggcgcttggcggctattatcgcgggctggccagcggcgccgctcaattgaacgcctatcgccagcagtggcgggaggcttggcgctttagccagctcattccccggcacagcccgcgaaggggcaaataagccgcgtgcagacatcgaggcaaagttgtgtcagcatcacggtaacgatcaccatgcccgccgctaagcgggtgcagatgaaccggctacattgtccggcaaatcagtagtcaggagcgaatatgttaagggtgtaccactcaaaccgtctggatgtgcttgaagcgttgatggagtttatcgtcgagcgccagcggctggatgaccctttcatgccggaaatggtgctggtgcaaagtaccggtatggcgcaatggttgcagatgacgttggcaaagcgctttggcattgcggcgaatatcgagtttccactaccggccagctttatctgggatatgttcgttcgcgtgcttgatgatattcccggcgagagcgccttcagtaaacagagcatgagctggaagctgatgaccctgctgccgcagtatctcgacgatgaagccttcacattgctgcgccactatctgagcgatgatagcgacaaacgtaagctgttccagcttgccgcgcgggtggccgatctgtatgaccagtatttggtttatcgcccggagtggctgatgcgctgggaggccgatgaacgggttgacgggctgggcgacgcccagcagtggcaggcgccgctgtggaaagcgttagttgaatacaccgcggaactggggcaaccgctatggcaccgcgctaatctgtaccagcgctttatcagcgcgctggaaaatgctgaccagccgccagccgggctgccgtcgcgggtctttatctgcggcatctccgcgctgccgccggtgtatttgcaggccctgcaggcgctgggcaagcacgtcgatgtctatgtactcttcactaacccctgtcgctactactggggcgatattaaagatccggcgtttcttgccaaactgatgtcgcgccagcgccgccaccaccgcgaggcgcgcgagctgccgctgttccgcgacaccgaacaggcaccggggttgtttaatgataatggcgagcaggatgttggcaacccgctgctggcctcgtggggcaagctcgggcgcgattatatctatctgctggccgggctggagcgctatgaagaactggacgcctttgtcgatatcgctcccgataacctgctgcataaccttcaggccgatattctggatctgcgcaacgccgcggtggcagggcgcaccgcgcaagagttcgccagcagtaagagcaagcgtccgctggcgactgacgatcgcagcctggctatccacgtctgccatagcccgcaacgtgaagtggaagtgctgcatgaccggctgctggcgatgctggaagaagatccggagctgacgccgcgcgatattatcgtcatggtcgccgatatagacagctacagcccctatattcaggcggtattcggcgcagcgcgcggcgaacgctggctgccgtgggcgatttccgaccgtcgggcgcgggagtcgcacccggcgctacaggcgtttatcacgttgctttctctgccggacagccgcttcgccagtgaagatgtgctggcgctgctggatgtgccggtgctggcggcgcgcttcaatatcaatgaagagggctacgctacctgcgccagtgggtcaatgaatccggcgtacgatggggcatggatgacgacaacgtgcgcgaaatggatctcccggcgaccggccagcacacctggcgtttcggtttaacgcgtatgctgctggggtatgcgatggacagcagccagggcgagtggcagtcggtgctgccctatgatgaatccagcgggctgattgccgaactggtggggaatctcgcttcgctgctgatgcagctaaatctgtggcgccgcggtctggcacaggatcgcccgctgacagagtggctgccggtgtgccgcgatctgctcacggatttcttcctgccggacagtgaaaccgaagcggcgctggcgctgattgaacagcaatggcaagccatcatcgatggcgggctggatgcgcagtacgggctgccgtgccgctatcgctgctgcgcgatgagctggcgcagcgcctcgatcagcagcgcattagccagcgtttccttgccgggccggtgaatatctgcaccctcatgccgatgcgttctattcccttcaaagttgtctgcctgctggggatgaacgacggcgtctacccacgcaccctcgcgccgctgggcttcgatttaatgagccaaaaaccgcagcgcggcgaccgtagccgtcgcgacgacgaccgctatctgttcctggaagcgctgatgtcggccgaacagaagctatacatcagctatatcggccgctctattcaggataatagcgagcgctatccttcggtgctggtacaggaactggcggactatatcggtcagagccactgccttgaaggcgatgaagcgctggactgcgatgccagcgaacgccgcgttaaggagcacattacccatctgcatacgcgcatgccttttgatgccgccaattacctgccggatgaagatcagagctacgcaagagagtggctggccgccgccagtcagcagggagaggcgcatagtgaatttatccagccgcttgcgccgcttgctatcgacacgttgccgtttgaacaactattacgcttttggcagcatccggtgcgggctttcttccagcagcgtctgcgggtgaatttccgctccgaagagagcgagatcccgaagatgagcctttcgtacttgaaggcctaagccgttaccagttgaaccaacagttgctgaatacgctgattgaacaacaggatgcgtcagcgatgtatcgtcgttttcgtgcggcgggtgagctgccttttggcgcgtttggcgaactggcatgggaggcacagcgtcaggaaatgcagaacctggctgagcgggttatcgccagtcgtcagcccgcgcaaagtatggagatcgacctgcagtgcaacggtatcaatctcaccggctggctacagcaggtacagccggatgggctattgcgctggcgtccgtcgctgctgagcgtctctcagggcgtgcaactttggctggaacatcttgtctattgtgctagcggcggtctcggcgaaagtcgcttgttcgtgcgcaaggaaggcgaatggcgtttcccgccgctggcggctgagcaggcgcagacgtatctgaatgagctggtagaaggctacctgcaggggatgtcaaaaccgctactgctgttgccggaaagcggcggcgcgtggctaaaagcctgttatgacgcggaaaaggatgtcatgttaatggatgacgaaacgcaacaaaaagcgcgtagcaagttccttcaggcctacgaaggtaatatggtggtgagcggcgaaggtgccgatatctggtaccagcgcctgtggcgtacccttgagcctgcgtactttgaagagattatcgcgcaggcgcagcgttatctgttgccgatatttcgtttccatcagtccgaataaaattgtaatagtataaaaattgcgcaaaagaaggttgttcatttattatgcgcagcgaatcacggactgatgttttaaatacccggaagatggcccgagcctgatgatgggtatccacgctgacgctatgcagcgcgaagtttgttaatgatgaggtccgtgaatgccccgcagtttatggttcaaagttcttgttgtagtggtcgccctttgggcgccgttaagtcaggcagacaccggatggcaaccgattcaggaaaccatccgtaaaagcgaaaaagatccccgtcactatcaggctattcgcctgcaaaacggcatggtcgtgctgctggtatccgatccgcaggcggtaaaatcgctgtcggcgctggtggtgccggtgggttcattacaggatccggccgaccatcaagggctggcgcactatctcgagcatatgaccttaatgggctcgcagaagtacccgcagcctgacagccttgctgaattcctcaaaatgcacggcggcagtcataatgccagcacggcgccgtatcgcaccgcgttctaccttgaggtggaaaatgacgcgctcaacggcgccgtcgatcggttggccgatgccattgccgcgccgctgctggataaaaaatatgccgaacgcgaacgtaacgcggtcaacgccgaattgactatggcgcgtacccgggacgggatgcgcatggcgcaggtgagcgccgaaaccatcaaccctgcgcatccggcttcacaattctccggcggtaacctcgatacactgagcgataagcctggtagcccggtgcttgatgcgctgcatgcttttcgcgacagctggtattcggcaaacctgatgaaggcggttatctacagcaataagccgctgcctgagttggcaagcattgccgccgcgacctacggacgggtgcctaatcatgacatcagtaaaccggaaattaccgtaccggtcgtgaccgatgcgcagaagggcattgtgattcactacgtgccggcgatgccgcgtaaggtgctgcgggttgaattccgcatagataacaacagcgctcaatttcgcagcaagaccgatgagctggttacctatatgattggcaaccgcagccctggtaccttatccgactggctgcagaagcaggggctggcggaagggattcgcgcggattccgatccggcagtcaacggtaatagcggcgtgctggcgatctccgctaccctcactgataaaggcctggcgcaccgcgatgaagttaccgccgctatcttcagctacctgaatttgctgcgtactcagggtattgataagcgctactttgatgagttagcccacgtactggagctcgatttccgctatccatcgattaaccgcgatatggattatgtggagtggttggccgataccatgattcgcgtgccggtagagcacgtactggacgtggttaatatcgccgaccgctatgatgcccaggcgattaaagaccgtctggcgatgatgaccccgcaaaatgcgcgtatctggtacatcagcccgaatgagccgcacaacaaaactgcttatttcgttaacgcaccataccaggttgataaaattagcgcccggaccttcgctgactggcagcaaaagtctgcggccattaagctgcagctgccggcgctgaatccgtatattccggatgattttacgctgattaagagcgataaggcctacccgcatccggagcttatcgtcgatgagccgacgctgcgcgtggtgtatgccccagccaatacttcgccagtgaaccgaaggctgatgtctcgctggtgctacgtaacccgcaggcgatggacagcgcgcgccgtcaggtgatgttcgcgttgaatgattacctggccggtatcgccctcgatcagcttagcaaccaggccgcggtaggcgggataagcttctcgaccggcgctaacaacggtctgatggttaatgccaatggctatacccagcgtctgccgcagctctttaccgcgctgctggacggctactttagctatacgccgaccgaagagcagcttgagcaggcgaagtcctggtatgcccagatgatggattcggcggacaaaggtaaagcctatgaccaggcgatcatgccgattcagatgctgtcgcaggtaccctattttgagcgtaaaacgcgccgtgctctgctgccgtcaatcaccctgaaagaggtgatcaactaccgtgataacctgaaggccagagggcgaccggagttgctggtcatcggtaacatgagcgcccggcagtccaccgatctggcccgccagatccaaaaacagcttggcgccgatggtaatgagtggtgtcgcaacaaagatgtgctgatcgacagcaaacagctggcgatgtttgaaaaagcaggcagcagcaccgactccgcgctggcggcggttttcgcgccgccgaacgtcgatgaatacagcagcatggccgccagttcgctgttagggcagattattcagccctggttctacaaccagttacgtactgaagaacaactcggctatgcggtattcgccttctcaatgaatgttggccgccagtgggggatgggcttcctgctacagagcagcgataaacagccggccttcctctggcagcgcttccaggccttcttcccgacggcggaagccaaactgcgggcgatgaaaccggaagagtttgcccagatccagcaggcggcgattagccaaatgctgcaggcgccgcaaacgttgagcgaagaagcatcaaagctgagcaaagatttcgatcgcggtaatatgcgcttcgattcacgtgataaagtagtggctcagatgaaactgctgacgccgcaaaaacttgccgactttttccatcagacggtggtggatccgcaaggcatggcactgttatcccaggtttccggcagccagaacggcaagacggaatacgccgcccctgaaggcggtaaggtatgggaaagcgtcagcgcattgcaaaaatccttacccctgatgcgagagaatgaatgaccgaaaccgctgagtctcttgacccactccgcttgcccctgacgggcgagcggctgatagaagcctccgcgggcaccggaaaaacctttaccatcgccgcgctatatctacggctgctgctggggctgggggggaatctgctttccccggccggtcagcgtggaagaactgctggtagttacctttaccgaagcggcgacggaagagctgcgtgggcgtattcgcagtaatatccacgagctacggattgcctgcctgcgcgaaagcgccagcgatccgctctatgcctctttgctcgcggaaatcgccgataaaaaccaggcggcgcaaacgttgatgctggcggagcggcagatggacgaggcggctgtctttaccatccacggcttctgtcagcggatgttgagccttaatgccttcgaatccggcatgctgtttgaacagcaactgatcgaagacgaatcccgcctgcgttatcaggcctgcgccgacttctggcgtcgccactgctatccgctgccgcgcgatatcgccgcggtgatccatgaacagtggaaaggaccgcgcgatctgctcaaggcgatcgaccgctggctacagggcgaagcgccgcagctaaaatcgccgccgcccgcagaagagacgctggcaagccgccatcagcaaatcctggaacgtatcaatgcgctgaagcagcagtggcgggagcaggtgggtgaaattgaaaacgtgctggaaagctcagggctcgatcgccgcaagttcaaccgcggcaaccagggcaagtggatcgaaaaggtaagcgcctgggcgcaggaagaaacgctgagttatcagttgcctgatgcactggaaaaattctcgcaaccgttcctcattgagcgcaccaaagacggtggcgaaccaccgttgcatccgttattcagcgcggtagaggcgctgctcgcctcaccgcttaccttaaacgatctggttatcgccagggcgatggtggagatccgcgaagcggtcgcccgcgaaaagcggcgtcgaggcgaactgggctttgacgacatgctcagccgccttgacgacgcgctgcgcggcgacagcggcgaagcgttggccagcgctattcgtcagcgtttcccggtggcgatgatcgatgagttccaggataccgatccgcaacagtatcgtatcttccgccgcatctggcgtcgccagccggatacggccctgctgctgattggcgacccgaaacaggcgatttacgccttccgcggcgccgatatttttacctatatgaaagcgcgcggtgatgtcgctgcccactatacgctggataccaactggcgttcggcgccaggcatggtacagagcgtaaatcgtctgttcggcctgagtgataatccattcatgttccgcgagatccctttcttgccggtgaagtcagccgctaaaaatcagacgttgcgctttaccattgatgagaagccgatcccggcgatgaacatgtggttaatgcctggcgaagccgtcggttctggcgattatcagtcttttatggcgcaattgtgcgcgacgcagatccgcgactggctcagcgccggccagcaggggcgcgcgctgctgtggcgcggcgaaaaagccgagccggtgcgcgcctccgatatcaccgtgctggtgcgtaaccgcctcgaagcggcgctcattcgcgatgcgctgcagcttttgtcgatcccgtcggtctatctctcaaaccgcgacagcgtttttgaaaccccggaagcgcacgaattactgtgggttctacaggcggtactggcgccagagcgtgaaaacacgctacgcagcgcgttggcaacctcgatgtttggccttaatgcgcaggatatcgaaaacctcaatcaggatgaacgtgcctgggatgcgctggtagaggagttcagtgaataccgtcacatctggcgccagcgtggcgtgatgccaatgttgcgcgcgctgatgggggcgcgtcatattgccgaaaacctgctggcgacccacggcggcgaacgccgtttgaccgatattttgcatatcagcgaattgttacaagaggcggctaatcagctggagagcgagcacgcgctggtgcgctggctgacgcaacatatcgccgaaccggacagcaatgcttccagccagcagatgcgtctggagagcgataagcatctggtgcaaatcgtcaccatccacaaatcaaaaggactggaatattcgctggtgtggctgccatttatcgcgcgctttcgcaaacaggatcaggcgttctatcacgaccgcgattcctttgctgcggtactcgacctcggagagggggagaatagccttgagctggcggaagccgagcgtctggcggaggatttacgcctgttgtacgtcgcgctaacccgcgcggtgtggcactgcagtctcggggtcgcgccgttaagtacccgccgtagcgataaacctggcaacagcgattttcatcacagcgccctcggccgcctgctgcaggacggcgagccgatggacgcggcgggattgaccgcacggcttcaggcattgtgcaacgatgatattgcgctatgtattcccgataccatggaccagacaccgtggcaggcgccggaaaacgcgctaccgtcgctttcggcgcggacgcttgaacgccaggtgagtgacgactggcgggtgaccagttattccggcctgcagcaacatggttccagcgccggtcaggacttactgccgcgtctcgatatcgacgccgcgggcgttggcgaggtggcggaagagccgcagctcacgcctcatcagttcccgcgcggcgcgtcgccggggactttcctgcatagcctgtttgaggatctcgatttcagtcagccggtaccggttgactggatggcgcaaaaactacagttgcacggttttggcgaagagtgggcgccggtgttgagcgaatggctggacggggtgctgcgaacacgcctgccggggctgaaatcgccctgaatcagctgggcgtgcgggataaacaggtggaaatggccttctatctaccgattgaacaaccgctggatccgctgcggttggacgcgctaatccgccgctatgatccgctgtcggctgataccccggcgctcgatttccgccaggtccgcggcatgctgaaagggtttatcgatctggtatttcgtcatgatggtcgttattacctgttggactacaaatctaactggctgggcgaagaccgcgaagcctacacccagcaggcgatgatccaggcgatgcgtctgcatcgttatgatctgcagtaccagctgtatagcctggcgctgcaccgttatctgcgtcaccgtattaccgattatcactacgagcggcactttggcggcgtcatttatctctttttacgcggcatggacgggcaggaaggcgggcaggggatcttcaccacccgcccggcgcagccgctgattgacggcctcgacgcgctatttgccggtgttaccctggaggtggactcatgaccatggatgaactgctgctggccgccgccgagcagcgtctgctgcgaccgctggacgtacagtttgcgctaatggtggcgcaggatgcccctccggcagtgaagctggccgccgcgctgctgagccgggatgccggagaaggtcatgtctgtctgccgctgtcgcgcctcaacgctgaagaagcgctaagcggcaaggccggcgagatccgcgaccagttgctggcgatagccggagagccgcaggactggcctcaattgttgctttcttcgtcagcggtgagccgcggcgacgaaccgacgccgatgattttatgcggcgacaggctgtacctgaaccgcatgtggcgtaatgaactcaccgtcgcccgcttttttaatgagacgaatcgggtactggaggttgatgaagggcggttaacggcaaccctgaatgaactctttcctgcgaccgacgatatcgactggcaaaaagtcgccgcggcggtggcgctgacccggcgcatttcggtgatctccggcggtcccggcaccggcaagaccactaccgtcgcgaagctgctggcggcgctgattcagatcaacgacacgccgcgttgtcgaattcggctggcggcgccgaccggtaaagccgcagcgcgcctgacggaatcccttgggcggcgttaagaaaacttccgcttagcgaggagcagaaagcgctggtgcccgccgatgccagtaccctgcatcgcctgctgggggcgcagcccggcagccaacgcatgcgctaccacgccgggaacccgctgcatctggatgtgctggtggtcgatgaagcctcaatgatcgacttaccgatgatgtcgcgcctgattgatgctttgccggaacatgggcgggtgatttttctcggcgaccgtgaccagcttgcctccgtggaagccggggcggtgcttggcgacatctgcgcctgggcgacatccggttataccgcggcgcgagcgcaagagctgtcgcggctgaccggcgcaacggtgccggcgggcgaggggcagatggcgggagcgctgcgcgatagtctatgtctgctgcaaaaaagctaccgctttggcagccattccggtattggcagcctggcgcgggcggtcaatgccggtgcgcgcgcagaagtgaaagcgacgttacgccagccgtttgaggatatcgttctgcagccgctcagcaccaccgaggagtatgaagcgatgctgatggcggcgcaggagggctatagccgttatctgcaactgcgccgcgagcaggccgcgccggaacagatgattaccgccttcggcgaatttcagctgctgtgcgcgctgcgtgaagggccttatggagtaagcggcgtgaatgaacaactggagcagatgctccatcgtaagcgggcgattacgctaccgcgccattcacgctggtacgatggtcgtccggtgatgatttcccgtaacgatagcgcgctggggctgtttaacggtgatatcggtattgcgctggaaagggacggcgaacttcgcgtgtggttcccgatgccggatggcagcattaaatcggtgcagccaagccgcctgccggaacatgataccgcctgggcaatgacggtgcataagtcgcaagggtcggagttcgatcatgcggcgctgatcttgccttctcgtagcgtaccgctggtgacccgcgagctggtttataccgcgattacccgcgccaaacggcgcctgtcgctttacgccgacgagcaggtactggcgcaagccatcgtgacgcgcaccgaacggcgcagcggcctggcggagattttcgcgcaggacggaaagcccggataaggcgcaacgcgccgctatccggggagttatccgtcagcccaggtccgccatcaataccttcgaacggcgctgatagttgtacatctgttttttactctccggcagcaaatcaatatccactggggtgaagccgcgttcctggaaccagtggatactgcgggtggtcaacacgaatagcttgctgagccccatctgcttcgcctgggcggcgatgcggctcaacagtacctcgccgcgtgacgaactacggtaatccggatgcaccgctacgcaggccatttcgccgattttctcttccgggaacggatagagcgcggcgcaggcgatggtggtgttatcgcgctgaataatggtgaatttatctatctccatctccagctgttcgcgcgagcggcgcaccagaatgccttgctgctccagcgggctgataagatcgaggatgccgccgatatcgttaatggttgcccggcggatctgctcggcgctttccatgacgatctgcgtaccgataccgtcacgtgagaacagctcctgcagcagcgcgccatcttcctgatagctaattaaatggcagcggcgcacgccgctgcggcaggctttcaccgcgccgcgcaggaagcgtacggtgccggaattataatcttcttccgcttccagctcctctacccgcgcctgcgcctcgttaggaaacagctcggaaacgatctcgccatgctggtcgtagaccccctgcgacgagcagaagccgatcatcttttcagctttcagctttaccgccagttgggtggcaatctcttcagaggtaaggttgaagctctcgccggtgacggataccgcgaccgggcccatgagcacgattgcgccgctatccagttggcgatgaatggcttcttcgtcgatgcggcgaatacggccgctgtggcagtaatccaccccatcatcgacgccaagaggttgagcgataataaaattgccgctcaccacgttgatatgcgccccctgcaggggcgtattgccgaggctcatcgacaggcgggcggtaatttctaactgcagcataccggcggcctgcttcaccagctcaagggttttggcgtcggtgacgcgggtctgcttgtgataaaccggctcgtggtgatgttccgcgaggttggcgtcaatttgcgggcgcgcgccataaaccactaccaggcgaataccgaggctatgcaataagccaatgtcattgactatgctggaaaagttatcgtgctcgatggcttctccgcccagcatgatgacaaacgtttttccccggtgcgcgtttatatagggaacagaatggcggaatccctcgaccagttcagtgcgacgctccttcaccatgacaaaccctcaatgcatgattattcgtaataaatgtatttttattctgttttgcttcgtggcgcaacccctaatttgtcactaatttgcgaaaacattgtgacaaaaccttgggtgtcaaagtttgtttacccttttatagatgacaggttatgcggctttggttaaagtttctggtcaatctgttcattttggcttcaaacacgtttttttgcttgggagtggcatgtcgggatacaagtcgggattaagccgccgtcgttttttacaaggggcgggcgccatgtggttaatgagtgtgagtccggtcggtttggccgctgccgcgcaggtagtcgcggtgcgtatatggccgtcgtcgacctacacccgcgtcacggtggaatccaatcatgtactgaaatatcggcagtttgcgttaagcaatcctgagcgagtggtggttgatattgaaggcgttaatctgaattcggttctgaaagggatgggcgggcagatccgcgacgacgacccgtatatcaaatccgcgcgcgtgggccagttcgacccacagaccgtgcggatggtgtttgaactgaaacaaaacgtcaaaccgcagctgtttgcgctggcgccggtcgccggttttaaagagcgtctggtgatggatctttatccctctacggccaccgatgtgcaggatccgctactggcgctgctggaagattacaacaaaggcgatctggaacgtcaggtaccaccggcagagagcgggccgcagccggggaaagccgggcgcgatcgtcctatcgttatcatgcttgatccaggccatggtggtgaagactccggcgcgattggtaaataccgaactcgtgagaaagacgtggtgctgcagattgcccgtcgattgcgcgcgctcattgagcgtgaaggcaatatgaaagtctttatgacccgtaacgaagacgtgtttattccattgaaggtgcgcgtcgccaaggcgcagaagcaacgtgccgatttgttcgtttcgattcacgccgacgcctttaccagccggcagccgagcggctcttcggtgttcgcgctctcgaccaagggcgctaccagtaccgccgcaaaatacctcgcgcaaacgcagaacgcctcggatttaatcggcggcgtcagcaagagcggcgatcgttacgtcgaccacaccatgttcgatatggtgcagtcattgaccatcgccgacagcctgaaatttggtaaagcggtgttgcaaaaaatgagcaatatcaacaagctgcataaaaatcaggtggagcaggcgggctttgcggtactgaaggcgccggatattccttcaattctggtcgaaacggcttttatcagtaacgtcgaagaagagcgtaaactgaagaccgctaaattccagcaggaagtggctgagtcgattctggcggggatcaaagcctactttgccgatggggcgacgttggccagacgcggataaaaaaatagcgccttagggcgctttttttagcggtatttacggacggcagaaacaaaaaaacacccttaagggtgttcattgtgttggttgcggggccggatttgaaccgacgaccttcgggttatgagcccgacgagctaccaggctgctccaccccgcgtccgtgtttactcttccatcgagtaaatttgcttctgattgtaattggttgcgggggccggatttgaaccgacgaccttcgggttatgagcccgacgagctaccaggctgctccaccccgcgtccgcgtctactcttccatcgagtagatttacttcagattttaattggttgcggggccggatttgaaccgacgaccttcgggttatgagcccgacgagctaccaggctgctccaccccgcgtccgtggaagcgcactatactccgctagcgttctgatgcaaccttttttcgtagaaatcgtcaattttgtaaaaaacggcggctaaaaatacagtaatgggcgaatttttacacaatttgggctgcggggcgctttcgtgcatttcattagccgcatgggtttgttatcttcatcacgcactaaggcttagcagcaataaagaagagataccatgaaaggacgttgggcaaaatatgtagcgacgggggcaatgctggcgatgctcgccgcctgttcctcgaaaccgaccgatcgcggtcagcaatatagtgatggcaagtttacccagccgttttcattggtaaaccaacctgatgcggtaggcgcgccgattaacgccggcgacttctcccagcaggttggtcagattcgtagcgcctctccgcgtctctataatagccagagcagcgtctataacgcgattcaggagtggctgcgttccggcggcgatacccgcacgttacgccagtttggtattgatgcctggcagatgcagggggccgataactacggcaacgtgcagtttaccggctactacaccccggtcgtacaggcccgccacactcgacagggcgagttccagtatcctatttaccgtatgccgccgaaaaacggcaaactgccttcccgcgccagcatctatgccggagcgctcagcgataactacgtgctggcgtacagcaactcgctgatggataacttcatcatggacgttcagggcagcggctatatcgatttcggcgacggttcgccgcttaacttcttcagctacgccggtaaaaacggctggccttaccgtagtatcggtaaagtgcttatcgaccgcggtgaagtgaagcgggaagatatgtcgatgcaggcgatccgtgaatggggcgaaaaacatagcgaagcggaagttcgcgagctgctggaacagaacccatctttcgtcttctttaaaccacagtcctacgcgccggtgaaaggggcgagtgcggtgccgttgattggccgcgcgtcggtcgcctctgaccgttcgattattccgccgggaaccaccttgctggccgaggtgcctctgctggataataacggtaagtttaacggtcagtacgagctacgcctgatggtggcgctggatgtcggcggagcgattaaaggccagcacttcgatatctaccagggcattggcccggatgcgggtcatcgcgccggttggtataaccactatggccgcgtgtgggtactgaaaaacgcgccaggcgccggtagcgtctttagcggttaacgtttaaacgtccgaacgtgtctaacccggatccgcgaatgcgccggatccggggtctctactttattctgaggttttatgtctgtagtaatcagcgatgcctggcgccagcggtttggcggtacggcgcgtttatatggcgaaaaggcgctgcagtgttttgccgaggcgcatgtctgcgtggtcgggatcggcggggtcggctcatgggcggcggaagcgctggcgcgaaccgggattggtgcgattacgctgattgatatggatgatgtttgcgtcaccaataccaatcgccaaatccacgcccttggcggcaacgttgggctggcgaaagcggaagtgatggccgagcgtatacgtctgattaacccggagtgccgggtcacggttattgatgatttcatcacgcccgagaacgtagcggaatacctgggagcgggctttagctatgttatcgatgcgatcgatagcgtcaggccaaaagcggcgctgatcgcctggtgccgtcgttataaagtcccgttggtcacgaccggcggagccggcggtcaaatcgatccgacgcagatccaggtggccgatttggcgaaaactattcaggatccgctggcggcgaaactgcgcgaacggctgaaaagccagtttggcgtagtgaagaatagtaaaggaaagctgggcattgattgcgtcttctcgaccgaagcgttggtctacccgcaggcggacggcagcgtatgtgcaatgaaaagcacggcggaagggccgaagcgaatggattgcgcctccggttttggcgcggcgaccatggtgacggcgacctttggttttgtcgccgtatcccatgcgttgaagaagatgttggcaaaagcgcagcgtcaggggagtagcccgggggacgttttgcggacggtgcagaaccgtagcccggctcagcgtagcgcaagccggggagagggcgtttgaattagttctcgcgggcggcggcgagcaccgcgtcgcttagcgcctgcagcccctggctgcgcgaagcgctaagctgcccgcgtaaacccagctcatcgaataacgccaacggatctttcgctaaaatctcagcggcgctttttccttcgcaggcggctaacagcaccgccagcaggccgcgcacgatacgcccttcgctatcgccaaagaagtgcatcttgccctcggcatcaacctgatatcccagccagacgcggttttcgcagccggcgatctctttcgcgtgtgcccgctggtcatccattaatggcggcagtttcttacccactaaaatcaactggcggtacttatcttcccactgtgtcagcggggcgaaggtctggcgcagcgtcgcttcgttcagcgtggcgcttaaaggttgggaggtcatcattaatccaccagtatttccagagcgcggtcgatagcgtgcaccagcgcataaacatcatcttgcgtattgtacggcgcgaatgaggcgcgcagcgtaccgctgacgcctaatgccgccagcagcggttgcgcgcagtgctgcccggcgcgtagcgcaatgccggactccgccagcagcgtaaccatatcgctatggtgtacgccctcgaaatcaaaggccagcaggctcgaatcctgacagcggaacgtacgaaagccgggccgctttgccagctcatcttccgcaagcgtcgccaggctacggctccagttttccgcctgtgcaagatcgatctcctgcagccattccagcgcggcgctgaggccgataacgccggcgacgttgggcgtcccggcttcaaaccgccagggggcgggctgggttttaaaaccatcgaacgagacttcagcgatcattttgccgccgccgagccatggcgacatctccgccagcaggtcgcttttgccatacagcgcgccaatacccgttgggccatacagcttgtgggcggagaaagcataaaaatcgatatccagcgcctgcacgtcggccgggaagtgcaccgcgccctgcgcaccatcaaccatcactatcattcccgcctgatgggcgagagcaatggcacgctgcagatcggggcagccgccggtgacgttagacatctgaccaatcgccagcacccggctgcgcggagagataagtgaaggaagttgagcgatatccggcagacgatcggcgcccaacggcagcttgaccacccgcgcgccggtttgttcggcgaccatcagccacggcacgaggttggcgtggtgttcggcttcgctgacgattatctcatcgccaggatgcaaacgcgggcgcacgtaactctgcgcgaccatattgatggcttcggtggtgccgcgggtccagacgatatctttactggaaggggcgttaagccagttggcgacgcgttcgcgcgccgcctcgtagcgctcggtaagacgctgggcggcggcaaactggctgcggtggacgttgccggcgctcagacgataaaactggtcgctggcatcgatcacggccagcggttttagcgccgtcgccgcgctatccagatagacgccggcatccgccagggctggaaactgggcgcggaagtgagcgggattgaatgcgttcatggaattcctcatatcgatatcacgatcgtcgcgcaaattccccatcagggcaaggctggtgatagcgaggaggcgggggaacggtgatttttcggcaaaaaaaagcaccgcgcattgcggtgctacattaaatcactatggacagacagggtaaatgtacaggaagtgaaaaggtagccttgctaccatggtctgcaaacccagaccaattgcaaacacaacaacacaacatcacaaccgtaagccaaaagcttgttggaacacgcattccaaaaaaagcttttcgttccggctcaggaagtgccgccactataggtatttgctggtagaacctcaacggacaatttataatggctcagataaaaaaaactaataggttaactgttgtttcctatttgttaaaattcgttaacatctcagtcagaataaccatgtcgaagcgattaccacctctgaatgcattacgtgtttttgatgcagccgcacgtcatctgagcttcactcgcgcagccgatgagctttttgtgacgcaggccgcagtaagtcaccaaatcaagtcactagaggactttctgggcctgaagctgtttcgtcgacgcaatcgctcgctgctgttaacggaagaggggcaaagctattttcaggatattaaagagattttttcgcagctcaccgaagccacgcgtaaactgcaggcgcgcagcgcaaaaggggcgctaactgttagtttattgcccagtttcgccattcagtggctggtgccgcgactctcaagctttaactcagcttatccggggatcgacgtgcgcatccaggcggtggaccgtcaggaagacaaactggccgacgacgtcgacgtggcgattttctatggtcgcggcaactggccggggctacgtgttgaaaaactgtacgccgaatatttactgccggtttgttcgccgttgttgttaaccggtgacaaagcgttgaaaacgcctgccgatctggcgcaacatacgctgttacatgatgcgtctcgccgcgactggcaaacttatacccggcaactgggtctaaatcatatcaatgtgcaacagggaccgatattcagccacagcgcgatggtgctgcaggcggcaatccatggacaaggcgtcgcactggccaataacgtcatggcccagtccgaaattgaagcaggccgtttggtctgcccgtttaatgatgttctggtcagtaagaacgcgttttacctggtttgtcatgacagtcaggctgaactgggtaaaatagccgctttccgccagtggattttggcgaaggcggcgagcgaacaagaaaaattccgctttcgttacgaacaataacggcctgatgaccaggcgttaactgactttgtagggtatcaacatgaccagccgttttatgctgatttttgccgccatcagcggctttatctttgtggctctgggcgcctttggcgcacacgtattaagtaaatcgttaggtgcggccgaaatggcctggatccacaccggccttgagtatcaggcgtttcatacgctggcgattttaggcctgtctgtcgccatgcagcggcggataagcatctggttttactggagcagcgtgtttttggcgctgggaactgtgttgttcagcggcagcttatattgcctggcgctgtcgcatttacgcctgtgggcgttcgttaccccggtaggcggcgtctgcttccttgccggttgggtattaatgttaattggtgcaattcgtctgaaacgtaagggcgttgttcatgaataaggttgtcctctattgtcgccccgggtttgagaaagagtgcgcagcagaaattaccgataaggcagcccgtcttgaggtatttggttttgcccgggtcaaagacgactccggctatgtgatttttgagtgctatcagcaaggcgatggcgagaagctggtgcgcgatctgccgtttagctcgctgattttcgcgcgtcagatgttcgttgttggcgaactgctgcgcgacctgccgccggaagaccgcatcacgccgatcgtcggcatgctgcagggcgtggtggaaaagggcggcgatctgcgcgttgaggtcgcggataccaacgaaagcaaagagctgatgaagttctgccgcaagttcacggtgccgctgcgcgcggcgctgcgtgaagccggcgtgctgaccaactatgaaacgccaaagcgtccggtggtgcacgtgttctttatcgcacccggctgttgctataccggctattcctttagcaataacaactcgccgttttatatggggatcccgcgcctgaagttcccttccgatgcgccgagccgttcgacgctgaagctggaagaggcatttcacgtcttcattccggcagatgagtgggacgaacgtctggcgaatggtatgtacgcggtggatctcggcgcctgtccgggcggctggacctatcagctggtgaaacgcaatatgtgggtctcttcggtcgataacggcccgatggcgcagagcctgatggataccgggcaggtgacctggctgcgtgaagatggcttccgctatcgtccgaaccgcaacaacatctcgtggatggtgtgcgacatggttgagaaaccggcgaaagtggcggcgttaatggcgcagtggctggtgaacggctggtgccgcgagaccatttttaacctcaaactgccgatgaaaaagcgctatgaagaggtgtcgcaaaacctggcctatattcaggcgcagcttgatgagcacggtattaacgcgcagattcaggcccgccagctgtatcacgaccgtgaagaagtgaccgtacacgtgcgtcgcctgtgggcggcggtcggcggccgccgagacgagcgctaatcagcgctcagcagccccggccacgtaacagcgcggccggggatcacgcggatggcaaacgcaactgctgtaggttgccatcgagctgtaaatccgtttgcaggcgggcgatttcccggcaggtaaacgccatctctttatgttcttcaagcttcttacgccatttctccggcacttcggcaagccgcgcgtagatgccttctaaatcctgataatccgttaatagctgcgccgcgcttttcggcccaatcccggcaacgcccggtactttcgaactgctaattcccgccagaccccagtaatccggcagttgctccggcgttacgccgaattcattggcgataaacggcgcatccagccagcgtttctggaaatagtcgcggatgcgaatggtcggcgacagcaactgacagtagcctttatcggtcgagacaatagtcgcctgatgcccggcctgggcaactttaacggcgagcgtggccgccaggtcgtccgcttcgctgccggccagcgcccagcagcggataccgcgctgctcgaaggccgccctcagcgccggcatttccgcttccagcgtttccggcatcggcgcgcgcccggctttatagtccggcagccgctggtggcgccagccgtgggcgcggtcttcatcgtcgaacaccgccacggcgtgcgtcggctggctgtggacgataagctgttccagggcgtgcagacaggtatccgcgcagggtgaaccctgcaccgcatgaatacggcggatcaggttgagcgcgtcgacaattaacagatgaacagccacaagatacctccctttgttctcaggttataagggtaacatcggtggcaagatgaggctattggtagagcgaagttcgggaagcaggctcgcagaatgagccagggctggaggggagttggcccgacatgccgaagcgtgccgggccagaggcgttaatcgcaggcgacgattttcatcgccaggccgccgcgagaggtttcgcggtacttggcgttcatatctttgcccgtttcatacatggtctcgataaccttatcgaggcacacgcgcggttcgctggtacggcgcagggccatgcgcgcggcgttaaccgctttgaccgccgcgatggcgttacgctcaatgcacggtacctgcacctggccggcaaccgggtcgcaggtcaggccgaggttgtgctccataccgatttccgcggcgatgcacacctgagccgggctagcgcccagcagctccgccagaccggccgcggccatcgagcaggccacgccgacttcgccctggcaaccgacttcggcgccggagatagaggcgttcatcttatacagcgaaccaatggcgctggcgaccagcatatagcgggccagagagttagcgttcaccttgcggataaacttgtcgtagtaggccagtaccgccggaacgataccgcacgcgccgttagttggcgcggtcacaacgcggccaccggcggcgttctcttcgtttaccgccagcgcgaacatgttgatccagtccactaccgccatcgggtcgctgttagtattgtcctggctcaccagcatgcggcgcagcgcggcggcgcggcgcgggacgcggagtttgcccgggagcacgccttcagtggtgatgccgcgttcaataccggcgctcatcacttcccacaccgcggcgaagtgctgttccagctcttctttgctgtgtagcgccagctcgttctgcatcatcagaccggagagcgacaggccggtttcattgcagtgtttctgcaggtcggcggcatttttgtacggataaggcacggcaaccggcgcctcggtggtcaggccgaagtgctcttcatcgacgataaagccgccgccgatggagtagtaggtctggctgtagagcactttgtcgccgcccagcgcggtaatgcgcatgccgttctcatgcagggacaggttgtcggcatggaaattcatgcactggtcgacagggaactcgacttcgtgctggccgttcgccagcagcaggcggccgtgggtgttaacgtcctggataaagcccggaatcgcgtcgatgtcgacggtatccggcagattgccggccagccccatgataatggcgatatcggtatggtggcctttaccggtcagagacagggagccgtaaacgtcgacgacgactttgctgacgtcggccagcaggccgcgcgcaatcaggtcgtcagtaaattgtttgcccgctttcatcggtccaacggtatgggagctggatgggccaatgccgattttgaaaatatcgaatacgctgatcatgatgtattccagtactgtcggaaagcgcgccgccgttaagcggcgcgaggggaggtcttaagagaattagctgaacagagagtagaaaatcgcggagatggcaatcaggcccataatcacaacgaagacgttgctgatgtggccgctgtatttgcgcatggccggaactttctggattgcgtacatcggcatcaggaacaggatcatcgcgataatcgggccgcccagggtctcaatcatgccgaggatgctcgggttcagcgtggccacaatccaggtggtgaccagcataaacagcgcggtcagcttgttcagtttgttgatttcgatggttttgcctttgccgcgcagagacttaatcaccatgccgttgaaaccttcacgagcgcccagatagtggccgaggaaggatttggtgatagcgatcatcgcgatgatcggcgccatccaggcgataaccggtgcgttaaagtggttcgccaggtaagacagaatcgagatgttctgctctttcgccgccgccaggtccgccggagacaggctcagtacgcagctgaagacgaagaacataacggtcagcaccatcatgatgtgagcacgcgccaggatgctggagcatttcttctctgcgccttcgccgtactcttcacgcttcgctaccgcgaaggaggagatgatcggcgagtggttaaaggagaagaccatcaccgggatcgccagccacaatgtcatcagcagaccgttaccggttgttgacgcgctgctcagcgacagggtttccagcgccgcgccgttccattgcgggatcaggtacagagccagaatcatcagcgcgataacgaacgggaataccaggatgctcattgccttaacgatcatctgctcgccgaaacgcacgatggtcatcatgccgacaatcaggatcagcgacagaatggcgcgcggcggcggcgtcatgtgcagctggtgcgccatgaagctttcgacggtgttggtgatcgccacgctataaaccagcaggatcgggtagattgcgaagaagtagagcagagtaatcagtttacctgcgcctacgccaaagtgttcttcaacgacttcggtgatgtcttcgcccggatttttaccggaaagcacgaagcgggtcataccgcggtgtgcgaagaaggtcatcgggaaggccagaatcgccatgataatcagtgggatcataccgccgacgccggcgttgattggcaggaacaaaacgcccgcgccgatcgccgtgccgtacaggcccagcatccacatggtatccgttttgcgccatccgctgcgggtttcacccgaaacgatagtgctggtttgtgtggtttccatctgtatctcctggaggaatcaacaaaatctagtaaataaaaacgattaaataatatgaaattcgttgctttacggttttttagaaattttctccgtaacaattgggcggcaagatacatttatatcggaaatgcatcagtgatcgggatcccaaatgcaataatccactttaaatatgaacgtttttagcccaacagtctgtttatggtgatcagccagataaatgtggcgcgaaggctatcatttgcagcacatgagataaaagctctgttaccaaataacgaggtttttgctgcaaaaaagtgatgtaaacgacgttttttcgccttaatgttatttttatggtgaattttattgctctttttggaaacgcaaacgtttggctatgtggaaactctacgaatcatttattagaaaaattaattaactggaaacagaggggagtgcccgggcagggtatcgaccgccgcccgggagaggtattacgttatcaggagcagatttcgtagcacggaatgtaggcgctgccgcccggaagcttcatgcggtgctgggcaacgaagccctgcagcagatcgtccatgcggcgcatcatttccggatcgccatgcagcttgtaagggccatatttctcgatagcctgaataccgacttctttcacgttgccggcgacaataccggagaaggcgcgacgcaggtcggcggccagcacttccaccggttggtccggataaagtttgagattggccatattgtcgtgcgtcggatcgaatggcatctgcaggtccggcgaaatacgaatcgaccagttgaagctgtaggcgtcgtcggtttcgcggcggctctctttgaccaatggcatcgcttttttcatctggcgcgccacttccgcggcatcgtcaataataatgcgatagtggcggcgagccgattcgccgagggtatgaacgatgaactcgtccagcacgcggaagtagtcggcgctctctttcggcccggtgaggataagcggcagcacctgcgatttgttatccggatgcatcaggatgcccagcagataaagcagctcttccgcagtacccacgccgcccgggaagatgataataccgtgggcgatgcgtacgaacgcttcgagccgtttctcaatatccggcatgatgatcagttcgttgaccagcggatttggcggctcagcggcgataatggagggttcggtcataccgataaaacggctgtctttatagcgctgctgggcgtggccgacggcggcgcctttcattggcgcttccatggcgcctggcccgcagccggtgcagatgttcagttcgcgcaggccaagctgggtaccgacgcggcgcgcgtacaggtattcattttcattaatagaatggccgccccagcagacaatcatattcggcgcttcgccgacgtgcagcgcgcgggcgttgcgcagaatcgaaaacaccaggttggtgatatgaattgagctttcgagatcgaggttcgggaagcggacggtgttgtggatctgcccgtagacgaacaggatatcgcgcagcacggcaaacaggttggcctgcagggaacggataatacggccatcgacgaaagcgtcttccggcgggttgatcagttccagcttcacgccgcgttcgcggcgcagcacgttaatatcgaagttttcaaaacgagacagtagctccttgctgttatcggtcaggctccccgagttgagcacagcaagcgagcagttgcgaaagagttgatacagatcactactggcggtgcgtttaagcatatccacttccagctgtgacaacatatccattgaaccaagcgggctaacatgtgtaatcaagtgaactccttacaggacgattatcgtcttcctgtgattacaatagccctggccgtagtctttccacaaccatgcgtacgcgttaacgcacgcaaagtgtgaaaaatttcgcttattgccgcgccagacgcccggttgccggcacgaattcaccgttgctgcgccacggattgatatccaggccgccgcggcgggtgtagcgagcgtacacggaaagcgattccggccggcagaaacgcagtacatcattaaagatgcgttcgacgcactgttcatggaattcattgtggtggcggaacgacaccaaatagcgcagcagtttctcgcgatcgattttcggcccgcgatactgaatctgtaccgagccccagtccggctggtgggtgatcagacaattcgatttcaacagatggctgaccagcgtctcttcgacgactttgccgctggcagcgtcctgcaggtagtcggcgctgaactgatagttatcaatctcgatatcctgatcgtcgatgcaggcgccatgcagatgagcgaccggttgcccttcaagctcatcgagtcggtacagcgaaaccttgacctcgccctgggcgcaggcgctgagatcgcgggtcagagtggcctgaacttcctgccagtcggcgaagcgggtctggttgaagctgttcaggtacagtttgaagcttttcgattccaccagattgatggtggtatcgctcagttccacgtagccgacggcgacctgcggcaggcctttggcgttcagccacgacagttcgtacagcgtccagatatcggcgccgtggaacggcagattatcggcatgcaggccgagcggatcgcggttcaggctgcgcggcacgccctgcagcaacgaagcgtcataggtatcgcggtaatccgttgatttaccgagcgtcaggccggccagcgcctgatgattatcgtaagaagacatgtttcaccatagtaaagcgggtacactatatgccaagtgtatcctgtctaacgtgaagagagaaaccggtggatcatcagaccatagaagcgctgcaatcatttacccaacgttactgcgatgcgtggcagcagcgttatgccagcctgccgcgtagcgaagacctttatggcatcccatctccctgtattagcgccagtgaagacgatgccgttttctggcagcagcagccgtttacgttagaaccacggctcgatggggttgaacgggcgctggagattgtggtacaacagccaattcatagttattataccactcagttcgctggcgatatgcacgcccgtttcgccgcacagaacctcactttgttgcaggcctggagcccggatgatttccagcgagtacaggaaaaccttattggtcacctggtggtacaaaaacgtctgaagctatcgccgacgctgtttatcgccacgctggatagcgaactggaggttatttcggtctgtaacctgagcggcgaagtgattaaagagacgctcggtacccgaaaaagagagagcctttctcactcgcttgcgagtttcctgaatcagcttgagccccttctgtaatccatttaccttggttgtttgtgagagatctcttacaagacctgtaagagatcgtcatcattttcagcaattttttacgtaaggattacgtctaacttgttgttataaaataacttgttaattatgtgctcttttagtttggccactaatcttaagagattgtcgtagtaagtcttgtaagaagaggcggaatcagtgatcctatgtatgtcgacaggaagtcgcgaatgaagagaacatcaggatgatggctcttctacaggacccgccaggatggcgttgcaaggacaggcttcaggatgaagcaaggataacgcaggaaagcgtaaaggacacctccaggatggagaacgagagccgctcaggatgaacggtggatcaggaagatctggacacacttagggataagttatttcacatcggggtggtgtgaaagcaggatgcgctagtttatggatgaacttggtcaggagacctcaggaaaagttttcaaggacgagcagggagcaccaatgtagctggaatgctgcaaaacgaaccgggagcactgtttatacagtgctccctttttttatttctctcgcggatttgctatcctgcgcccggtttacaattcatcgaggtttccccatgacccttcacgctagcgtgcgcgatcgcctgcacgccattgaagcgctgctgcgcgaaacaaaccactggcaggaacaggccccggatagccgcgctttcgccagcgagcagccgttttgcctggacacgctcgagccgctggaatggctacagtgggtgctgatcccgcgtctgcatcaactgattgccagcggtatgccgctgccgcagaactttgccgtcgcgccctattacgagatggcgctggataaagcccatccggcgcgcgaagctatcgtggccgagttgctgctgctggatgcattattcgcggatgaagacgcctgatgctggagattatttaccaggacgagtggctggtggcggtgaataaaccttccggctggctggtgcaccgcagttggctggatcgcgatgagaaagtggtggtgatgcagaccgtgcgcgatcaaattggccagcacgtcttcaccgctcatcgtctggaccggccgacttccggcgtgctgctgatggggttgtcgagcgaggcgggcaggctgctggcgcagcagtttgaacaacaccagatgcaaaaacgctatcacgccatcgttcgcggctggttgactgaagaggcggtactggattatccgcttgtagaagagctggataaaatcgccgataaattcgcccgcgaagataaaggcccgcagccggcggtgacccactatcgcgggctggcgacggtagaaatgccggtcgccaccggccgttacccgaccacccgctacgggctggtggagctggagccgaaaaccggtcgtaaacatcagctgcgtcgccatctggcccatctgcgccatccgatcctcggcgacagcaaacatggcgatctacggcaaaaccgcagcgccgctgaacatttcggctgtaatcgcctgatgctgcatgccagtcagctgtcattaacgcatccgtttaccggcgagccgctgacgattcgcgcgggcctggatgatatctggatgcgcgcgctgtcgcagtttggctggcgcgggcttctcccgctaaatgaaagggttgagtttgccgacgacagcggtcaggatgagagtatcgcggataatccagggagataatcactatggcagaagtcggaatttttgtcggcacgatgtacggaaactcgctgttggtcgccgaggaggcggaagccattctgagcgggctggggcataaagcgacggtctttgaggacccggaagtaaaagactgggaatcctataccggcaaatacgtgctggtcgtgacctcgaccaccgggcagggcgatctgccggacagcatcgttccgctgtatgaaggcattaaagatatgtatcaaccgcatctgcgctacggcattattgcgcttggcgatagtacctacgccaacttctgcggtggcggtaaaacctttgatgcactgctgcaggaacagggcgcgcgtcgtattggcgagatgctcaccattgacgccagcgaaaacccggaaccagaaagcgtttccaacccttgggtagaagcgtgggctaaactgctcgactaatcctattaagaacgccctctccctacgtagagggcgcgcttaagctgccagtggccggataaacggtcagggttatcttaccgttctccatcgcgcccggcttcgggcatctgcctgataaccactttatcgctatggcttttttctttgcgtttccccggcgtcaagagagccgattcacactctgatggtaatgtcgtccatcgacccatcagcgggcgatggttttccatttccgtgaactactccccacaaccttaggcataagccacaaactaacgcagtatcacccgctaaagctgtgtatatgcacggtgagcccgccgaagcctctttttatacttttcctgccagtgacaaaagcagtacgccagatataacgaaaaaaacactaacacgtcattctgattaccctacaggttgtgctgttcagaatgaacgtagctaaacgctatgattcaggagtacaacaatgagttcattaagtcaggctgcgagcgccgctgaaaagcgcaccaatgctcgctattggatagtggtgatgctgtttatcgtcacatcctttaactatggcgaccgcgcgacgctgtcgatcgccggttctgaaatggccagggatatcggccttgatcccgttggcatgggttacgttttctccgcgttttcatgggcctatgtgatcgggcagatcccaggcggctggctgcttgaccgctttggttctaaacgcgtctatttctggtccatctttatctggtccgtgtttaccctgctgcagggcttcgtcgatatctttagcggctttggcattatcatcgcgctgtttaccctacgctttctcgtcggtcttgccgaatcgccctcgttccctggcaatagccgcattgtggccgcatggttcccggcgcaggagagagggacggcggtatcgatttttaactccgcgcagtattttgccaccgttattttcgcgccgattatgggttggttgacccatgaagtgggttggtcgcacgtattcttctttatgggcgggctgggtattgtcatcagcttcgtttggctgaaagtgatccacgatcccaataaccacccaggcgttaaccagaaagagctggactacatcgccgaaggcggcgcgttgatcaatatggatcaaaagagcagtgcgcagaaggtgccctttagcgtaaaaatggaccaaatcaagcagttgatcggctcgcgaatgatggtcgggatctatatcggccagtactgcatcaacgcgttaacctacttctttatcacctggttcccggtttatctggtgcaggcgcgtggcatgtcgatcctcaaagcgggctttgtcgcctcgattccggcggtgtgcggctttgtcggcggcgtgttgggcgggattatttccgactggttgatgcgccgtaccggctcgctgaatattgcgcgcaaaacgccgatcgtactgggcatgctgttgtccatgaccatgctgatgtgtaactacgtcaacgcggaatggatgatcatcggctttatggcgatggccttctttggcaaaggcattggcgcgctgggttgggcggtaatggcggacaccgcgccgaaagagattagcggcctgtccggcggcctgttcaacatgttcggcaatatttccggcatcgtaaccctatcgctatcggctatatcgtcggcaccaccggctctttcaatggcgcgctgatttacgtcggtatccacgctctggtagcggtactcagctacctggtgctggttggcgatatcaaacgtatcgaacttaaaccggttgcggggcgttaatcatgaatacccaatccagcccgatcgttaccgaaatgaaggtgattccggtcgccggacacgacagcatgctgatgaacatcggcggcgcgcataatgcctggtttacccgcaacatagtggtgttaaccgacaacgccggccataccggcgtcggtgaagcgcccggcggcgaagtcatctaccagacgttggtcgatgccataccccaggtggttgggcaggaggtcgctcgactcaaccgcgtggtgcagcaggtacataaaggcaatcaggcatcggatttcgacaccttcggtaaaggcgcatggaccttcgaattgaaagtcaatgcggtggcggcgctggaagccgcgctgctcgacctgcttggcaaggttttgaatgttccggtctgtgaactattgggaccgggcaaacagcgtgatgcggtgaccgtgctgggctacctgttctatatcggcgaccgcgaaaaaaccgatctgggctatcttgcgcggacgccgggcgaccatgaatggtaccgtcttcgtcaccagcaggcgttgaacagcgacgcggtggtgcggctggcggaggcggcacaggatcgctacggttttaaagactttaaattaaagggcggagtgctgccgggcgagcaggagattgacaccgcccgcgcgctgaaaaaacgcttccctgacgcgcgcattaccgttgatccgaacggcgcctggctgctggatgaagcgattacgctgtgcaaagggctgcaggatgtcctgacctatgccgaagatccgtgcggcgctgaacagggcttttccggccgggaagtgatggccgagttccgccgcgccaccgggctgccggtggcgaccaacatgatagccaccaactggcgcgagatgggtcatgcggtcatgctcaacgccgtcgatattccgctggcggacccgcacttctggacgctctccggcgcggtgcgggtggcgcagttgtgcgatgactgggggctgacctggggctgtcattcgaacaaccactttgatatttcgctggcgatgtttacccacgtcggcgccgcggcgccgggcaatccgaccgctatcgatacccactggatttggcaggagggcgattcgcgcctgacgcaaaatccgctgcagattatcaacggcaaaatcgccgtgccagacgcgccgggactcggcgtagagctggactgggaacaggtgcataaagctcatgaggcctataaggcgctgccaggcggcgcgcgtaacgatgcgggcccgatgcagtatctgattcccggttggacattcgaccgtaaacgccccgttttcggccgtcattaattaaaaaggattacgctatgactacatcatcttcaacgccaattgtgaccgctatgcaggttatcccggtcgccgggcatgacagcatgctgatgaacctgagcggcgcgcacgcgccgtacttcacccgtaatatcgttatcatcaaagataactccgggcataccggcgtcggcgaaatccccggcggcgaaaagatccgccagaccctggaagacgctgcgccgctggtggtgggtaaaacgctgggcgagtacaaaaatgtgctgagcgccgtgcgtaaccagtttgccgaccgcgatgccggcggccgcggcctgcaaaccttcgatctgcgcaccaccattcacgtggtgaccgggattgaagcggcgctgctggatctgctgggccagcatctgggcgtgaacgttgcttctctgcttggcgacggccagcagcggagcgaagtcgaaatgctgggctacctgttctttgtcggtaatcgccacgcgacgccgttggcttatcaaagccagccggatgaacagtgcgactggtaccgtattcgtcatgaagaggcgatgacgccggaggcggtggttcgcctggcggaggccgcttacgaaaaatatggcttcaatgactttaaactgaagggcggggtgttggccggttttgaagaagccgaagcgattagcgcgctggcgaagcgtttccctgatgcgcgcgtgaccctcgaccccaacggcgcctggctgctggatgaagccatccagataggtaaacagctgaaaggcgtgctggcctatgcggaagatccatgcggcgctgaacaaggtttctccggtcgcgaagtgatggctgaattccgtcgggcgaccgggctgccgaccgcgaccaacatgatcgctaccgactggcggcagatgggccatacgctgtcgctacaatcagtggatattccgctggcggacccgcacttctggaccatgcaagggtcggtacgtgtggcgcagatgtgtcatgaattcggcctgacttggggttcgcactctaataatcacttcgacgtgtcgctggcgatgtttacccatgttgccgcggcggcgccgggtaaaattaccgctatcgatacccactggatctggcaggagggtaaccagcgtctgaccaaacagccgtttgaaatcaaaggcggtatggtgcaggtgccgacgacgccgggtctgggcgttgagctggatatggaccgcgtgatgcaggctaatgagctatataagaaacatggcctgggcgcgcgtgatgacgccatggcgatgcaatatttaatcccgaactggacctttgataacaaacgtccttgcatggttcgctaagataacgccgaccctgtaagggtcggcaactgccggtcgccggggttattcatattaaggacacttatgaagatagtgatcgcgccggattcttacaaagagagcctgagtgcgctggacgtcgccaccgcgatagaaacggggttccgcgaaatttatcctcatgcggagtacgttaaagtcccggttgccgacggcggcgagggcaccgttgaggcgatggtggccgcgacccaagggcatatcgtacaggtcagcgttaccgggccgcttggcgaaccggtcaacgccttttacggcctgtccggcgatatgcgctgcgcttatatcgaaatggcggcagccagcggactggaaagcgtgccgcccacgcgacgtaatccgctactgactacctcctggggaaccggcgagctgattcgtcacgcgttggatgcggggtttcgcagattattattgggatcggcggcagcgcgaccaatgacggcggcgccggtatggcacaggcgttgggagcgaaactgctgaacgccgggcaacagcaaattgcaccgggcggcggcgcgctggagacgctggcgcggatcgatctcagcgaactggatccaagattagcggattgccggattgatgtcgcctgcgacgttaccaatccgttaaccggcccgcagggcgcaagcgcggtgtttggcccgcaaaaaggggcgacggcggcgatgattgagcgtcttgaccgcggcctgcaacactttgcgcagattatcgaccgtgatttggatatcgatgtgctgagcctggaagggggcggcgcggcgggcggtatgggggcggcgttgtatgcgttttgcggcgccaacctgcgtccgggaattgagatagtgaccgatgcgctggggttggcggatttagtggctgatgccgatttagtaattaccggcgaaggtcgcatcgacagccagaccatccacggcaaggtaccggtggggtggcgaaggtcgcgaaacgctacaacgtgccggtgattgggattgccggcagcctgaccgccgatgttggtgttgtgcatcaacatggcctcgatgccgtctttagcgtgctctattccgtctgtaccctggacgaagcgttggcgaacgccgccgccaacgtgcggatgacggcacgtaacgtggcggcggtattgcagatgggcggcaagctgtaattgagcgctccccggtggcgcttacgcttaccggggctaccaccgaataccggggcgtagcccggataaggcgcgcagcgccgctatccggggtttacactcccatcctgcacgcttcgcgggcaacattatccatctcatctaacagttccagcagttccggctccagctcttccggcgcggtaccggcgcgcaactggctttcaagggtatggcacagttttttcagccgcggtacgccgctatagctgcagctgccgtgcagcttatggattaaatccagcaacccttccggctcctcgccaaccagctgttcttcaactttattgcgcacctccggcataaaggcgagcagcatttgcagcatctcccgcgcgaggtctggtttcatggccgcctgacgcagcgccagttgccagttgagcgtgacgttatgatcgataaccggctccaccggctcggcgatttgcggcgcggcgacgtgcatgcctggctgatagcgcaaaagcagggtgctaagcttatcttcttcaatcggcttcgccagataatcgttcatcccggcagccagtagtttttcgcgctgcccctcaagggcgtgagcggttactgcgatcactggggtctgctgctgatgcgggagatgacggattaattcacaggcgcgaataccgtccatatccggcatctgaatatccatcagaatgagatccaactgcgactgttttgcctgctcaacggcatcctggccgctatcgcacagaatgacatgctgcaccagatcgtccagcagcgcgccaataagcttgaggttagccgggttatcatctaccgccattaccgtcatcgccagtttatcgctatcgatatagggctgtggcaccggtggttgcgcgcggcaagaagccattagcaccgggaaaagccgtgtggaagttagtggtttaagcaggcaggcggtaacaccgttccttttcagctcttcggcgctaacctgcgcgtggcaaggcagccccagcaccagggtatcggatagcgagcaggcgcggaccagcttatcccgctggttgctgagatcgcgcatcgacaccggaataccggccagtaaaatatcgtagtgggcatccggcagcgctgacagcgtcgggctgtagaccacttccagcggtgtggttgccagcagttccatcgtgctttgcgcggcggtggcgttggcttcaatgtaggccagcttcttgcccgccaggcagtgggtatcgaaaccgtcagttacggcgttcggattcaggtcaagactgatatggaaccagaaggtagaaccgcggttcggctggctatggaatgagatatcgccgcccatctctttgaccagacgctgggtgataaccagacccaggccggtgccgccgtggcggcgtgagatactggcatcggcctggcggaaggcctggaacaaccgcgactgatcgcgctccggaatgccgatgccggtatcatgaatctgtacttcaatttgtactcgcgaattgctcatcgcccgttgttccactagcacatcaatgttgccgtgctcggtgaatttaatcgcgttgcccaccagattggtgatgacctgctgcaggcgcagcggatcgccaatcacattatccgggacatcgcttttaatgttgagggtgagctcaaggcctttatcgtgcgccgaatgtgccagcaaggtcaccacttcatccagggtattgcgcagcaggaaaggaatgctttccagaatcagcttgcccgcttcgagcttggagaaatccagcacgtcattgatgatggccagaagattattcgccgaacgttcgatggtggtcaggtggtcacgctgggtagcgttgagatcggttttcaaggtcagacgggtaaagccaatcacgccgttaagcggggttcgtagctcgtgcgacatattggcaaggaactcggacttgatgcgcgcggcctcctgggcgcgctttttcgccagatccagctcgacgttttgaatctccatctgctccagcgtttcgcgcagatccgaggtcgcctgatcgacattgtgctgcatctcctcatggtaggccgccagcgacatcgccatcgagttaatgccgtttttcagcatatccagctcgccgagcataaaaccttcaacgcggctatccaactggccgcggcggatgcggtcaacggtgttgaccatattacgaatcggcccggtcacgtcgcgcatcaagcgccagccgaaaatcagcgcaatgccgatacaaaacagcatcatgacgcttgagataaatatctctttgtactgctgcaggcgcacagatttaaggtcgagctccagcgccacatagccgagcatattgtccggcattttagcatcgctttccggcgactcatcgggcagatagctttctgacacaataggcgtgcgcagcaccatgatgtcgccgtggcgggtgacgctcagtcggcgagggaagggcgcgccgcgcggtagctgtatttcacgcggatcgagctgatagttagaggtgacgaaaagccggttttttgcatcatagatagaaatagcccgcacgatatcggaatggcggcggtgaagtacgctgataagttgaccgatcgcctcgcgattttgcaaattcatgccgtactcactggataccgccagcggttcgataatactggcgccggcatcctccaactgccgctgcaggtcgttatagcggtgggcgacgaagaaaatactgagcagcaaaccaatcaaaacggtcggcgccagaataagaatcatcatgcgagcacgtaggctgtagttggtcatgcggttccattatgggagaatatacatatcaaccttcagacggcttctgcattggtagcccgaatgatttcatgtatagagtcagtatatttttgagataatcctctacgatggcgcaattctactctgcaaaacggcgtgtgacgacgcgccagatcataaccgtgacggtaaatgaccttgatccctttggccagggcgtagcccgtcatcagggtaaggcgctgtttgtccccggcctgttgccgcaagagcaggcggaagtcgtgctggtagaggataaaaaacagtatgcccgcgctcaggttaaacgccgcctcaacgacagtccacagcgcgttgcgccgcgctgtgggcatttcggcgtctgcggcggatgccagcagcagcatgcgagcattgaactacagcagcaaagcaagcgcgccgcgctctcccgcctgatgaaacgtgacgttgacgacattatagccgctgaaccctggggctaccgacgccgggcgcgtttgagcttgaattatcagccgaagacccaacaactgcagatgggttttcgtaaggccaactccagcgaaatcatcaatgtggtgcagtgccctgttttggtgccccagcttgaggcgttgttgcccgcggtgcgcgagtgtttaaccagcctgcagtcacaacgtcaacttggccacgttgaactggtgcaggcggacaatggcccgctgatggttttacgccatactgccgcgctgacggcagcggataaagaaaaactggaacgtttttcgcaaactcacggtctatccctgtacctcgcgccgcaaagcgagatacttgaacatattcgcggcgatgaaccatggtacacgtcagacggactacgcttagtgttcagtccgcgcgattttatccaggtcaacgatggcgtaaaccagaagatggtgcgtacggcgctggcctggttagatattcagccgcaggaccgcgttctggatctgttttgcggtatgggcaatttcaccctgccgctggccaaagcggcggcgagtgtggtgggcgtcgaaggcgtacccgcgctggtggcaaaggggcgggaaaatgccgccctcaatggattgcagaacgtgactttctttcatgaaaacctggaagaggatgtcacccggcaggcctgggcgaagcatggctttgataaaattctactcgatccggcaagggccggggcgccgggcgtgatggcgcatattatcaagctggctccgcggcgggtggtctatgtttcatgtaacccggcgacgctggcgcgtgatagcgaggcgttgcttcaggcgggatattgtattcaacgtctggcgatgctggacatgttcccgcacaccgggcacctggaatcgatagtattgtttgagcgcgagcttacataaaattgttcagcccgcatcgaggcgacagtgaagatgcctgatggcggtgtggactgaaggatgaagtatgacgggtatgaaatatggcttgctgacttcggtaggctgagtcccttaaggagaggacaatggttgcggtaagaagtgcacatctaaataaagctggtgagtttgacccgaagaaatggatcgcgagtctgggaatttccagccagcagtcgtgtgagcgcttagccgagacctgggattattgtcgcgcaacaacgcagggacacccgcaggcggatctcctgctttggcgcggcgtggagatggtagaaattctctccatgctcaatatggatatcgataccttgcgggccgctttactgtttccgctggcggacggcaacgtcgtcagcgaagaggtcctgcaagagagcgtcggcaaatccgtcgttaccctgattcacggcgtgcgtgatatggcggcgattcgccagctcaaagccacgcacaccgacaccgtctcctcagaacaggtcgacaatattcgccgcatgctgctggcgatggtcgatgatttccgctgcgtggttatcaagcttgcggaacgtatcgctcatctgcgcgaggtaaaagatgaacccgaagatgagcgcgtactggcagcaaaagagtgtaccaatatctatgcgccgctggcgaaccgtttaggaatcggtcaactgaagtgggagctggaagactactgcttccgttacctgcatccagccgaatacaagcgcattgctaagttgctgcacgaacgccgtatcgaccgcgaacattacatcgatgagttcgtcggccacctgcgctcagaaatgaaaaatgaaggcgtgaaggctgaggtatacgggcgtccgaagcatatctatagcatctggcgcaaaatgcagaagaagcatctcgcttttgatgagctgtttgacgtgcgcgcggtacgtatcgtcgctgaacgtttgcaggattgctacgcggcgctggggatcgtgcatacccactatcgtcatctgcctgacgaatttgatgattacgtcgccaacccgaaaccgaacggctaccagtctattcataccgtggtgcttgggccgggcggtaaaacggtcgagatccaaattcgcaccaaacagatgcatgaagacgccgagctcggcgtggcggcgcactggaagtataaagagggcgccagcgccggggcgagcggcggtcgcggccatgaagaccgtatcgcctggctgcgtaagctgatcgcctggcaggaagagatggcggattccggcgaaatgctcgacgaagtgcgcagccaggtctttgacgaccgggtctacgtgtttacgccgaagggcgacgtggttgacctgccggcgggctcaactccgctcgactttgcctaccatatccatagtgatgttgggcaccgctgcatcggtgccaaaattggcgggcgcattgtgccgttcacctatcagctgcagatgggcgatcagattgagataatcacccagaagcagccgaacccaagccgcgactggctgaacccgaatcttggctacgtgaccaccagccgtgggcgttccaaaattcacgcctggttccgtaaacaggatcgcgacaaaaacattctcgccgggcggcagatcctcgacgatgagctcgagcatctgggcatcagcctgaaggatgccgagaaacatctgctgccgcgctacaactttaatgaactggatgaactgctggcggctatcggcggcggcgatattcgccttaaccagatggtcaacttcctgcaggcgcagttcaacaaaccgagcgccgcggaacaggatgccgccgcgctgaagcagctgcagcaaaaaacctacaccccgcagaaccgcagcaaagacaatggccgggtggtggttgagggcgtcggcaatctgatgcatcacattgcccgctgctgccagccgatccccggcgacgaaatcgtcggctttatcacccaggggcgcgggatttcagtacaccgcgccgactgcgatcagctggctgagctgcagtctcacgcgccggaacgcatcgttgatgcggtatggggcgagagctattcggcgggatattcgctggtggtgcgcgtggtcgccaacgaccgcagcggcctgctgcgcgacattaccactattcttgccaacgaaaaggtgaacgtgctgggcgtggccagccgcagcgatacgaaacagcagctggcgaccatcgatatgaccattgaaatctacaacctgcaggtgttgggccgggtgctcggcaagctgaaccaggtgccggatgtgatcgacgcgcgtcgtctgcacggcggttaattcgtctgtaggccggataaggcataaatgccttatccggcctactatttttaaatttccaggattgttacatgactcaaattgaccgcctgctcggcatcatgcgccgcctgcgcgacccggaaaacggctgcccgtgggataaagaacagacctttgccactatcgccccttacacccttgaagagacctatgaagtgctggacgccattgcgcgcgaagattttgacgatctgcgcggcgagcttggcgatctgctgttccaggtggtgttctacgctcagatggcgcaggaagaagggcgttttgatttcaacgatatctgcgccgccattagcgacaaactggagcgtcgtcatccgcatatctttggcgatgcttcggccgggaacagtgaggaagtgctggcgcgctgggagcagattaagagcgcggaacgagcggaaaaggcgcaacactcggcgctggatgatattccgcatagcctgccggcgctgatgcgcgcgcataaaattcagcgtcgctgctcggcggtgggctttgactggacctcgcttggcccggtgctcgataaagtgcatgaagagatagatgaagtcatgcatgaagcgcagcaggcggtggttgatgaagctaaacttgaggaagaagtgggcgatttgctgttcgccacggtgaatttgtcccgtcatttaggggttaaagccgaggtcgcattgcagaaagcgaaccttaaatttgagcgccgcttccgcgaagttgagcgtattgtcgccgccagaggtctggaaatgaccggcgttgacctcgaaaccatggaagaagtgtggcaggaagtaaaacgccaggaaactgatctctaacgagttttcgtgatcaagcgctatttgtgtgattttataaataacaagcgcttgatttacgtcaaaaacatttcgccaaaagcggctattttctcattccgttatgttgttgaaacaccatgtagcctgcctcttcgagttgttcgagtcgcaacgcaggtgcggctggtagaaagaagaggaggggagaatgaaagtttgtggcgtcacgcatgttcgggtatactactttcccgtcctggttattccatcgttttaccctaacttctcaggttcagcatgacaacgaactatatttttgtgaccggcggggtcgtatcctctctgggtaaaggcattgccgcagcttccctggcagccattcttgaagcccgtgggctcaatgtaactatcatgaaactggatccgtacatcaacgtcgatccgggcaccatgagcccaatccagcacggggaagtgttcgttactgaagacggcgctgaaaccgatctggacctgggccactacgagcgtttcatccgcaccaagatgactcgccgcaacaacttcaccaccggtcgaatctactccgacgttctgcgtaaagagcgccgtggcgactacctgggcgcaaccgtacaggttatcccgcacatcaccaacgccatcaaagagcgcgtactggctggcggcgaaggccatgacgtggtgctggttgaaatcggcggtaccgtaggcgatatcgaatccctgccgttcctcgaagctattcgccagatggcggtagaaatcggccgtgagcataccctgtttatgcacttgaccctcgtgccatacatggcggcggcgggtgaagtcaaaactaaaccgactcagcactctgtaaaagagctgctctccatcggtatccagccagatatcctgatttgccgctccgatcgtgcggttccggccaacgaacgtgcaaaaattgcattgttctgtaacgtcccggaaaaggctgtgatttctctgaaagacgtcgattccatttataaaattccaggcctgttgaaatctcagggtctggacgattatatttgtaaacgattcagcttaacttgtccggaagcaaacctggccgaatgggaacaggtaatctatgaagaagctaacccggcaggcgaagtcaccattggtatggttggtaagtacattgaactgccggatgcctacaaatcggtgattgaagcgctgaaacacggtggtctgaaaaaccgcgtgaccgtcaacatcaagcttatcgattcgcaggatgttgaaacgcgcggcgtcgaaatcctcaaagatttggacgcgatcctcatcccgggcggcttcggctaccgcggcgttgaaggcaagatcgccaccgcgcgctatgcgcgtgagaacaatattccatatctgggcatctgcctgggtatgcaggttgcgctgattgagttcgcgcgcaacgtagcgggcatggaaaacgccaactctacggaatttgtgccagactgtaagtacccggtggtggcgctgattaccgaatggcgtgacgaagaaggcaatgttgaagttcgttccgagaagagcgacctcggcggcaccatgcgccttggcgcgcagcagtgccagctgggtgatgattctctggtccgtcagctgtacggcgagccgactatcaccgagcgccatcgtcaccgttacgaagtcaacaacatgttgttgaaaccgattgaagctgccggcctgcgcgttgcgggccgttccggggatgatcagttggtcgagatcatcgaagtgccgaaccatccgtggtttgtggcctgccagttccacccggagtttacttcgacgccgcgtgacggccacccgctgtttgcaggctttgtgaaagccgcgagcgagtaccagaagcgtcaggcgaagtaaaagagttagaacggcaatgcacccaactgggtgcattgtttgtctggagttttagtttaacttgtactgaggaaaacctaatgtccaaaatcgttaaagtcatcggtcgtgaaatcatcgactcccgtggtaacccgactgttgaagccgaagtacacctggaaggtggtttcgtcggtatggcagctgctccgtcaggtgcttctactggttcccgcgaagcgctggaactgcgcgatggcgacaaatcccgtttcctgggtaaaggcgtaaccaaagctgttgctgcggtaaacggcccgatcgctcaggcagtcctgggtaaagatgctaaagatcaagctggcatcgataagatcatgatcgacctggacggtactgaaaacaaatccaacttcggtgcgaacgcaatcctggcggtatccctggcaaacgccaaagcagcagctgcttctaaaggccagccgctgttcgaacacattgctgaactgaacggcactccgggcaaatactctatgccggttccgatgatgaacatcatcaacggtggtgagcacgctgacaacaacgtcgacatccaggaattcatgattcagccggttggcgcgccgactctgaaagaagccgtacgtatgggttctgaagtgttccatcacctggcgaaagttctgaaatccaaaggtatgaacactgcagttggtgacgaaggcggctacgcgccgaacctgggttccaacgccgaagcgctggctgttatcgctgaagcggttaaagcagcaggatacgaactgggcaaagacatcactctggcgatggactgcgcagcttctgaattctacaaagacggtaaatacgttctggctggcgaaggcaacaaagcgttcacctctgaagaattcacccacttcctggaagaactgaccaaacagtacccgatcgtgtccatcgaagatggtctggacgagtctgactgggacggtttcgcataccagaccaaagtactgggcgacaaaatccagctggttggtgacgatctgttcgtaaccaataccaagatcctgaaagaaggcatcgaaaaaggcatcgctaactccatcctgatcaaattcaaccagatcggttctctgaccgaaactctggctgcaatcaagatggcgaaagacgctggctacaccgctgtcatctctcaccgttctggcgaaactgaagacgctaccatcgctgacctggctgttggtaccgctgcaggccagatcaaaactggttctatgagccgttctgaccgcgttgctaaatacaaccagctgattcgtatcgaagaagcgctgggtgaaaaagcgccgtacaacggtcgtaaagagatcaaaggccaggcttaatcctgactttttgtgaaataaaaatgccagtctgcggactggcattttttttacctgcgaattgcacttacttgaaatcgacggccatttgctgcgggatagaaagcccgcgggtggtttgtacgcagcggtcgatataatcggtgaagcgcggcggtttgggcatgcccatgcttagcagcttatcattgctgaagcggacgttcagcgtcgcgaaggcgccatacaggcgcatcgctttgagcatcaggcgctcgttgcacgggccaaaaatatccttcaactcacggcgcattttaactagcgtctcgtagctaacctgcgcgtatcggtcgcctaccggagcctgctccagcgctgaggccatcgcgcgatcgatttccgcaaatttcacgctgttttcttctccggcggagatatgcacgacttcaccacgcgccaacgggcgttgtaataacatcagcagcgcgtcggcgcagtagtcgaccgggatcacgtcaacacggtcttccagtgagcagaggaatttttgcagcattagcccatgctgaacacccaaaaaatgctgcttgagggctgacaaccgtgatgagtatgaccaacgacgatagaagggcgggcgatggctaacggtaacgtcgggcattgctcctgcatcaggcgctcaatcgtcgatttggaatgggtatactccaccagatgctcggcgtgctcgcggaattcagcgctttctgcgaccagtgaatctggcttcggggtacaggacatcgcggtcccaacgtggagaaaacgttgtagtccagctacgcgggacatccgttgggcaaatttgaacgttccttcgacgttcactttccagatgagcgggttattaccaaatgaggcgacggcggcgctgttgataacgtgagtgacctgctccagacgcgggtcgctcaggaacgcctccggtgatgacaaatcgccgagcaggatctgccgggggttaatgcggccagcttctcctctgcaatattgaatttacgcaggttttccttcacccgggtcagagccgcttcatcgttattggctcgcaccaggagcagtagattaatcccattttcattattaaggatattctctaataccgctccgcccagaaatccggtaacacctgtaattaataatgtattcatgaatgcagtctctcatggttggtcgactggattctaggcgcggaaaattaaacggagattaaataaaaacaggctgtaataatcggtttcttaagcttattttaatctatggaattcaagcgaattgtatttgactctgagcgaagataaaaaattcattgtttcatgtatcggtttgtacatcgttgattaatggtttctttttgttgtttcatgccgcaattgataatgtcattacgatcatgaaaaacattctttgtaacatctttatctgcgagcagatacgccgcaataaagttatgaatgatcggatttaatgaccgggcacgatgcatgctaaaataatagtcaatatatcgtaaatacaatttgtgcttattttatagtttgctaactaatataaaaagagggtctccaccccgctggcaatgggctcaggtaagcgcagctgaggacaagacctgagcgcctgaatctgcgataatacctttttaccacctgaacagagatgactatgcagtacccgattaacgagatgttccagaccttgcaaggcgagggttactttaccggcgtgcctgccatttttattcgtttgcagggatgcccggttggttgcgcctggtgcgataccaaacatacctgggataagctggccgatcgggaagtgtctctatttagtatcctcgctaaaaccaaagagagcgataagtggggcccggcgaccagcgaggatctgttggcaatcattggccgtcagggatggaccgcccgccacgtagtgattaccggcggcgagccctgtattcacgatctcacgccgttgaccgacctgcttgagcaacatggtttcagctgccagattgaaaccagcggcacgcatgaagtgcgctgcagccacaatacctgggtcacggtctcgccgaaagtgaacatgcgcggcggctatgatgtgctttcgcaggcgctgcagcgcgccgatgaaatcaagcatccggttggccgcgtgcgcgatatcgaagcgctggatgaactgctggaaacgctggccgatgaaaagccgcgtattattgccttgcagccgattagccaaaaagaagacgcgacgcggctgtgcattgagacctgtatcgcccgaaactggcgcttatccatgcagacgcataaatatctgaacatcgcctgacccctgctttcattgccgggtaggttgctcaccacccggcagctctcttcttcatatatgaattcatcattgcactcgatttcagcgccggggttgagatacgccgtcatgacagcagtgctatcattggcgcattaattcagccgcctgaagcgggcggctgatacgttgacttaaggaacgagttaaccatgcagccaattgaaccacccactgccttctctatggacttcttctcgctcagggggaaaaccgctatcgttaccggcggcaatagcggcctggggcaagcctttgccgttgctctggcgaccgccggcgcgaatctgtttgttcccgctctgcgcgaagaacatacgcaaacccgcaagcttatcgaacagcagggcgttgagatggaattcatgctggcggatatcaccgatggcggtatgccgcagcggattatcgccgcctgctgcgaacgtttcggtaccgttgatattctggtgaacaatgccggtatttgtcacttgaataaagtgctgcgctttgggcgaacagaatgggatccgatgatcaatactaacctgaccgcagcgttcgagctcagccacgaagccgcgaaaattatggttccgcggcgaagcggtaagattattaatatctgttcggtgttttcttatctcggcggcagttggtcgccggcctatgccgccaccaagcatgcgctagctggcttaaccaaagcctactgcgatgagctgggcccgcataatattcaggttaacggcatcgcgcctggctattacgaaaccgccatgaccgctatcacccgcagtatcccgaaagagaacagacgcgtgctggcgcatatacccgcaggccgttggggagaagcgcaggatttaatgggcgccgttgttttcctcgccagccgggcctcggattacgttaacggtcatattctggcggtggatggcggctatctggtgcgttgattccaacggcgtgggatgaaacagaaaaccgccatggcagcagcccgatggcggatagacagaaattactcgccgcgatagacgcagcctgcggtgcaggtctcttttaccattaccgcgctcagcaaaggaaccagcggtttcatttgatcccaaatccacttggccagcacttcgctggttgggttctccagtcctgggatatcgttcaggtaatagtggtctaaacgatcgtaggtcggtttaaacgcggctttcagctcggcgaaatccatgatccacccggtatggggatcgacttcaccggtaatctccagacgcaccataaaagagtgaccatgcaggcgaccgcatttgtggcctttcggtacgtgcggcaggtggtgggcggcttcgaaggtgaaatctttaaacagcgtggtggacatcattaactctcaacaggacgaaaaaaaccgccgtagggtaccggaaagtacattttttagcattaactaaaacggccctgaacgcaaaatcgacgtttttgttgtatttggatgatttaatttattgtttttcaatcatttaactaatcgtttttgttgttaataactataactaaaacaggttagtccatttggttatttgttatttccatcccttctttaattgttagtatgcccgccgttaaccttacaatctcttctgtttttgtcgcgctgacagggcgtgaataacagctttgcttactggaacataacgacgcatgacgacacaggccccaccttccaatctgctgccgctaaacccggagcaactggcgcgcctacaggcggccacgactgactttacgccaacccaactggcttgggtgtccggctacttctggggcatgctgaatcagcagcccggcaccgtggtaagcgcgcccgctcaggcggtagaagcgccggccatcaccctgatttccgcttcgcagaccggcaacgcgcgtcgggttgccgaagcgctgcgcgacgatttgcaggccgcgcagctgaacgtgaaactggtgaacgctggcgactataaattcaaacaaatcgccggtgaaaaactgctggtcgtggtgacgtcgacccagggtgaaggtgagccgccggaagaagccgtcgcattgcataagttcctgttttcaaagaaagcgccgaagctcgatggtaccgccttcgcggtgtttggcctcggcgatacctcctatgagtttttctgccagtccggcaaagatttcgatagcaaactggccgaactgggcggcgaacgcctgctcgaccgcgttgatgccgacgttgaatatcaagccgcggcggcggaatggcgcgctcgcgtagtggatgtgctgaaagcgcgcgcgccgacggctgcgcctgcccagcttactaccagcggcgctgtgaatgaaattcataccagtccgtatactaaagaagcgccgctgacggcgacgcttgctgtgaatcaaaaaataaccggtcgcgactcggaaaaagatgtccgtcatattgagatcgatctgggtgattccggcctgcgttatcagccgggagatgctcttggcgtgtggtatcagaacgatcctgcgctggttaaagagcttgtggagctgctgtggctcaagggggatgaaccggtcacgatcgaaggcaaaacgctgccgctggcgcaagccctggagtggcatttcgagctgacagtcaacaccgccaatattgttgagaactatgccaccctgacccgcagtgaaacgctgctgccgctggtcggcgataaagcgcagttgcagcactacgctgcgacgacgcctatcgtcgatatggtgcgcttctcgccggcacagctggatgccgaagccttaatcggcctgctgcgcccgctaacgccacgcctctactcaattgcttcctcgcaggcggaagcggaaaacgaagtccacgttaccgttggcgtcgtgcgttatgacatcgaaggccgcgctcgcgccggcggtgcgtccagcttcctcgccgaccgcgtggaagaagatggcgaagtgcgcatctttatcgaacacaatgacaacttccgtctgcctgctaacccgcaaaccccggttatcatgattggtcctggaaccgggatcgcgccgttccgcgccttcatgcagcagcgcgcggcggaaggggcggaagggaagaactggttgttcttcggcaatccgcacttcacggaagatttcctctatcaggtggaatggcagagctacgtcaaagagggcgtgctgagccgaatcgacctggcctggtcccgcgatcaacaacaaaaagtctatgtacaggacaaactgcgtgagcagggggctgaagtgtggcgttggattaacgacggcgcccatatttatgtctgcggcgatgccaatcgtatggcgaaagacgtcgagcaggcgttactggaagtgattgccgaatacggcgcgatggacgccgaagcggcggacgaatttttaagtgagctgcgcgttgagcgccgttatcagcgagatgtctactaatgagcgaaaaacatcctggcccgctggtggtcgaaggtaaactctccgacgccgagcgtatgaagatcgagagcaactacctgcgcggcaccattgcggaagatttaaatgacggcctgaccggcggttttaaaggcgataacttcctgctcatccgcttccacggtatgtaccagcaggacgaccgtgatattcgtgcggaacgcgcggcgcagaaactggagccgcgccacgcgatgctgctgcgctgccgtctgccgggcggcgttatcaccaccaaacagtggcaggcgatcgataaattcgccgcagataacaccatctacggcagtattcgcctgactaaccgtcagaccttccagttccacggtattctgaagaagaacgtgaagccggtgcaccagatgctgcactccgttggcctggacgcgctggcgaccgccaacgatatgaaccgcaacgtgctgtgcacctcgaacccgtttgagtcgcagctgcacgccgaagcctatgagtgggcgaagaagatctccgagcatctgttaccgcgtacccgcgcttatgctgagatctggttagatcaggaaaaggtcgctaccaccgacgaggaaccgatcctcggccagacctatctgccgcgtaaattcaaaacgacggtggtgatccccccgcagaacgatatcgatctgcacgccaatgatatgaacttcgtggcgattgcggaaaacggcaagctggtcggctttaacctgctggtgggcggcgggttgtctatcgagcacggtaataagaaaacctatgcgcgtaccgccagcgagttcggctatctgccgctggagcacaccctcgcggtggcggaagcggtcgtgaccacccagcgcgactggggtaatcgtaccgatcgtaaaaacgcgaaaaccaaatatacccttgagcgcgtcggcgtggagaccttcaaggcggaagttgagcgtcgtgccgggatcaaattcgaaccgattcgtccgtacgagtttaccggtcgcggcgatcgcattggctgggttaagggtatcgataataactggcacctgacgctgtttattgagaacggccgtattctggattatccgggccgcccgctgaaaactggcctgctggagatcgcgaagattcacaaaggtgaattccgtatcaccgccaaccagaacctgatcatcgccagcgtaccggaagatcagaaagcgcggatcgagaaactggcccgcgatcatggcctgatgaatgccgtcacggcgcagcgcgagaactcaatggcctgcgtgtcgttcccgacctgtccgttagcgatggccgaagccgagcgtttcctgccgtcgtttatcgacaaggtcgaagaggtgatgagcaaacacggcgttggcgatgagcatatcgtaacccgcgtcacgggttgcccgaacggctgcggccgcgcgatgctggcggaagttggcctggtgggtaaagcccctggccgctataacctgcatatcggcggcaaccgcagcgggacgcgcattccacggatgtatcgcgaaaatatcaccgagccggagatccttgcttcgctcgacgagctggtagggcgctgggcgaaagagcgcgaagcgggtgaaggcttcggcgactttacggtgcgtgcgggcatcattcgcccggtgctcgacccggcgcgtgatttctgggaataacctgaattgccggatagcggcatgaatgccttatccggcctaccattcgcgtaggcctgataagcgaagcgccatcaggcaaggcacacagtgaggaatctatgtccaaactcgatctaaacgcgctgaacgatctgcctaaagtagaacgcgtaatggcgttggcggaagttaacactcagctggaaaaactcagcgccgaagaacgcgtcgcatgggcgctggaaaacctgcccggcgactatgcgctctcttcaagctttggtattcaggcggcggtcagcctgcatctggtgaaccagctgcgcccggacattccggtgatcctgaccgataccggctatcttttcccggaaacctatcagtttattgatgaattgaccgagaagctcaacctgaaccttaaagtctaccgggcgacggaaagcgccgcctggcaggaagcgcgttacggcaaactgtgggagcagggcgttgaaggcattgagaaatacaatgaaatcaacaaagttgagccgatgaaccgggcgctgaaggagctcaacacccgcacctggtttgctggcctgcgccgtgagcagtccggcagccgggcgcatttaccggtgctggctatccagcgcggcgtctttaagctgctgccgattatcgactgggataaccggacggtttatcagtatctgcaaaagcacggcctgaaataccacccgctatgggagcaggggtatttgtccgtcggtgacactcacaccacccgtaaatgggaacccggtatggcggaagaagaaacccgattctttggtctgaaaagagagtgcggattgcacgaaggctaagcgatgcgctatgccagagagtgttattccaaagcggacacgcgggctataccgcgggttcgctttgcgcaaatcactttttcttctcaactttcgccagctctttcaccagcggcagcatcactttgactacatcgcgcccgcggtgctcgatccttcccggcagcgctttgtcgatatactgttggttatccagttgtacatcatgccagctggtaccctgcgggaagctacgagttttactgcgctgctggtatccatcctttttacccaatgaccagttagtcgcttccacggagagtaccgggatcccggcgctatcaaaaacgctggcatcgttacagcagccagtacctttcgggaactccggattcagccctggattggtgaatgcggcgatgccgtgactacgggcgatagccagcgcgcgatcgcgggtcagcttgcgtaccgatgccggtgtgctgcgcccgctattgaaatagagcttatcaccgaccaccaggttatcgagattaatcaccagcagcgtgtttttcttttccgcctcgctcatgcgcttaagtatattttgcgcgcccaggcggccttcttcctcgccgctggtggcgataaagcgaatgccgtaacgggtggggacgttctttaaatgttccgccagctcgagcagcacgccgagccccattgcgttatcgtcgatcccctgcagcgtcaggccgccaaggttgttctcaacgtctttatcgctttgcggcgcataggtatcgaggtgcgccataatgatgatttgctgacgagactgcccttcatgcgcggcgataaccgtgctgccggtggcgttgtgccagttcttacgttggttgctgtcggtatagatgtagcgggtattaaagctacgtacgtcgctttgataacccatctgggcaaactgttgacgaagataatcggctgatagcatctcggccggcgtaccggtcattcttccggggaagacggtagcaatatggcgggcctgggtattggcggtgtcgcccagggcgctgaatgccggagcggcggagaagacaaaacctgtgccaagcgccagcggaagcagacggcggcacatcgcggaaaacataatgggtccttacacgagcgaaacatttcgaccgcgttagtatgaaactgtgacgccgcttaaacaatttcatttgctcttaaatagcggaaaacgcgcacgttaagcactttttgatatttgtattttcagctcgttattcttttgcgtcacaactcattccatttcgtaatttcatttgcttaaagccgcaccctatagtccctctattgctgaatgtaagagagttgttgcgccgtggattacttgcccctgtttgccgagttgaaagagagacccgtgctggttatcggcggcggtgaaattgccgtacgtaagattaaattcttgctgcgggcgcaggcgaaggtacaggtggtcgccgccgttctatcgccggagctcgctgaacaggttgaacgtcagcaaatcagctggcgggcaaccgcctttgatgaacagcaggtggacgatgtatttctggtgattgccgccaccgacgatcgtgaacttaaccagcgggtgtttgccgcggctaacgcacgctaccgcctggtgaacgtggtggatgaccagcaactgtgctcattcgtctttccttctattgtcgacagatcgccgctgctggtggcgatctcctccagcggcaaggcgccggtgctgtcgcgcattctgcgtgaaaaaatcgaagcgctactgccaaccaatctggggcggctggccgaaacggcgagctactggcgccatcatctgaaaacccggctgaccaccaccgaagcgcgccgtcgcttctgggagcgcgttttcaccgggcgttttgccagcctgatggtggccggtaaccatgcggcggcggaacgggcgctgcaggatgaactcgacaggccggaacgcagcgtgggcgaaattattctggtaggcgccgggccggggatgccgggttgctgacgctacgcggcctgcaggcgattcaacaggcggacgtggtgttttatgaccacctggtgaccgagagcgtgcgggaactggtgcgccgcgatgccgaaatgatctgcgttggcaagcgcgcgggcgagcactccgtgccgcagcacgaaacaaaccaaatgttggtggaggccgccaaagcggggaaaacggtggtgcgcctgaagggcggcgatccgtttattttcgggcgcggcggggaggaactgcaggccgccgccgccgccgggatcccgttccaggtggtgccaggcgttaccgccgcggcgggcgcgacggcctatgccggcattccgctgacccatcgcgattatgcgcaaagcgcagttttcgttaccggtcactataaatctgacagcgcgccgtttgattgggcgctgctggcgaagagccaacaaacgctggcgatttacatgggcaccatgaaagcggcggacatcagcgctcagctgatcgcccatggccgcgacgcgaatactccggtggcggtgatttcccgcggcactcgcgaggatcagcagacgctgacaggtacgttacaacagctcgaacatctggcgaaagatgccccaatgcccgcgctactggtggtgggcgaagtggtacagctgcatcagcagctcgcctggtttcaacacacaacgacagcggaagggtttaactcttctgtggtaaatctggcttaaggaacggttatggaccaaaaacgactcactcacctgcggcaactggaggcggaaagcatccatatcattcgtgaggtggccgccgaattctctaacccggtgatgatgtactccatcggtaaagattccagcgttatgctgcatctggcgcgcaaagcgttttatccgggaaccctgccgttcccgctgctgcacgtcgataccggctggaaattccgtgagatgtacgagttccgtgaccgtaccgccaaagcctacggctgcgagctgttggtgcataaaaacccggaaggggtggcgatgggcatcaacccgttcgtccacggcagcgccaagcacaccgatatcatgaaaaccgaaggcctgaagcaggcgctgaacaaatacggctttgatgccgcatttggcggcgcgcgtcgtgatgaagaaaaatcccgcgctaaagagcgtatctattccttccgtgaccgcttccaccgctgggacccgaaaaatcagcgtccggagttgtggcacaactacaacggccagattaacaaaggcgaaagcattcgcgtcttcccgctctctaactggaccgagctggatatctggcagtacatctacctggaaaatattgaaatcgttccgctgtacctggcggcagagcgcccggtactggagcgcgacggtatgctgatgatgattgatgacgaccgtatcgatctgcagccgggcgagatgatcaaaaagcagatggtgcgcttccgtaccctcggctgttggccgctgaccggcgcggtagagtccaacgcgcaaacgctgccggaaattattgaagagatgctggtatccaccaccagcgaacgtcaggggcgcgtcattgaccgcgaccaggcaggctccatggagctgaaaaaacgtcaggggtatttctaaggagccgccatgaacactactattgcacaacaaattgctaatgaaggcggcgtagaagcttacctgcacgcgcaacagcacaaaagcctgctgcgttttctgacctgcggcagcgtcgatgacggcaaaagtaccttgattggccgcctgctacacgatacgcgccagatttatgaagatcagctctcttccctgcataatgacagcaagcgccacggtactcagggcgagaaactggatctggcgctgctggtggatggcctgcaggccgagcgtgagcagggcatcaccattgatgtcgcctatcgctacttctcgactgagaaacgcaaatttattattgccgacacgccgggccatgagcagtacacccgtaatatggcgaccggcgcgtccacctgcgatctggcaatcctgctgattgacgcccgcaaaggcgtgctcgaccagactcgccgccacagctttatctccacgctattagggattaagcacctggttgtcgcggtgaacaaaatggatctcgtcgagtttagcgaagcgcgcttcaatgaaattcgtgaagattatctgaccttcgccgaacagctgccgggcaaacttgatatccgtttcgtgccgctgtcggcactggaaggggataacgtcgccagccagagcgacaaaatgccgtggtacagcggcccgacgctgctggaagtgctggaaaccgttgacattcagcgcgaggttgaaagccagccgctgcgcttcccggtgcagtacgtaaaccgtccgaacctggatttccgcggtttctccggcaccgtcgcttccggtacggtcaccgttggccagcgcctgaaggtgttgccgtcgggcgtggagtcgaacgtggcgcgtattgtcacctttgacggcgacctgccgcaggccggggcgggggaagcgatcactatcgtcctgaaagatgaaatcgatatcagccgcggtgatttgctggttgacgccgaagcctcgttgcctgcggtacaaagcgccagcatcgacgtcgtgtggatggcggagcaggcgctgtcgccgggccaaagctatgacatcaaagtggctggcaagaaaacccgcgcccgcgttgacgctatccgctatcaggtcgacatcaataatctgacccagcgggaagtcgacacgctgccgctgaacggcatcgggctggtggagctgacctttgacgagccgctggtgcttgatccatatcaggacaacccggtgaccggcggacttatctttatcgatcgcctgagcaacgtgacggtgggcgcgggaatggttaacgaaccgcacctgcaggcgcaggccccgacgtcgcagtacagcgcgtttgagctggaactgaatcagctgattcgtaaacacttcccgcactgggacgcgcgcgatctgctgggaggcaagtaatggcccggcatgacgaaaacgtcgtctggcatgcgcatccggtgacccgagagcagcgcgagcagcaccatggccatcgcggcgtggtgctgtggtttaccggcctctcggggtcgggtaaatccaccgtcgccggggcgctggaagaggcgctgcatgagcttggcgtcagtacctatttgcttgacggcgataatgtgcgccacgggctgtgtagcgatctgggattcagtgacgacgatcgcaaagagaacattcgccgcgtcggtgaagtagctaagctgatggtcgatgccgggctggttgtattgacggcgtttatctctccacatcgtgcagaacgccagatggtgcgcgagcgtttgggagaaggacgctttatcgaggtctttgtcgatactccgttagccatctgcgagacgcgggatccaaaaggattgtacaagaaggcgcgggcaggggagttgcgcaattttaccggtattgattcggtctatgaatccccggagaatgctgaaattcatctggatggtgaacaattggtaacaaatttggtgcaccaactattagacctgcttcgacagagcgatattatcagatcctgaaaaggcaacggcatcgaggggtgccggtcggccggtcaacaggattcgatatgcgcaatacccagaacctcagtattattcgttcagaaccgcctccggcggccagcgacgagaccacctggtctttgtcgggcgccgccgtgggctttatttcgtggctgctggcgctgggtattcccttcctcatgtatggcggtaatacgctctttttcttcctctatacctggcctttcttccttgccattatgccggtcgccgtggtggtcggtattgcgctacattcattactggacggcaagctgatttacagcgtttgcgcgacgattttaaccgtcgggctgatgtttggtctgctgttcctctggctgttgggatagcctttttgggatgaatcaagcctgggtatccatcgcaaaaatgtgttacagtccccgcgttacgcggcatcgtccgcgcgccagggtagagtactccggcgagttatgggatgatgatgccgtttttcagggggcaggatgggtaaattaacgctgctattattagctttgctggtctggctacagtactcgctgtggtttggcaaaaatggtttgcacgactatagccgggttaatgacgatgtctccgctcagcaggctactaacgccaaattaaaagcgcgcaacgatcagcttttcgccgaaattgacgatctcaacggcggccaggaagcgatcgaagaacgcgcgcgcaatgaactcagcatgacccgcccgggcgaaacgttctatcgtctggtgccggatgcctcaaaacgcaatcagggttctgcgcagaataatcgataaacaagcccaggatgacaatatggcagccacttttccgggcgtttgcgccgtggtgccggcagccggttttggccgccgtatgcaaacggagtgcccgaaacaatatctctcaatcggtaacaaaacgattctcgaacattcggtcgccgcgctgctggcgaacgaacgcgttcagcaggtggtgatcgccgtcagccccggcgacatccgctttagtcaacttcctttagctcaccatccgcaggtcaccgtcgttgacggcggcgccgagcgcgccgattcggtactggcggggctgaaagcgttagcggatgcgcaatgggtgctggttcatgatgccgcgcgaccgtgcctgcatcaggacgatctctcgcggctgctggcgctgagcgcgaccagccgcgtcggcggcatactggcggcgccggtgcgcgataccatgaagcgtgccgaaccgggcaaaaccgcgatcgcccataccgttgaacgcaatgatttatggcatgcgctgacgccgcaatttttcccgcgtgaactgctatttgactgcctgacgcgcgcgctggatgaaggcgcgaccatcaccgatgaagcgtcggcgctggagtactgcggcttccatcccgaattggtcgccggacgagctgataatattaaagtaacgcgcccggaagatctggcgctggccgaattttaccttacccgttcccgacaccaggagaaggcttaatgcgaattggacatggttttgacgtacacgcttttggcggtgaagggccaattattattggcggggtacgtattccttatgagaaagggctgctcgcccattccgatggcgacgtcgcgctacacgcgttgaccgacgcgctattgggcgctgcggcgctgggcgatatcggtaaactgttcccggataccgatccggcctttaaaggcgcggatagccgcgagctgctgcgtgaagcgtggcggcggattcaggctaagggatatatccttggcaacgttgacgtcaccatcatcgcccaggcgccaaaaatgctgccgcatatcccgcaaatgcgcgtgtttatcgccgaagatctcggctgccatatggacgacgtcaatgtgaaagcgaccaccaccgagaagcttggcttcaccggccgtggcgaaggcatcgcctgtgaagcggtggcgctgctgcgtaaggctgcgcaatgatcgcctttgatgacttaacatacctgcacggcaagccgctgggccaggggcggctgaaggccaatccggaagactttctggtggtcgaagacctcggtttcgcccctgatggcgaaggcgaacatgtgctggtgcggattctgaaaaatggctgcaacacccgttttgttgccgatgcactggcgaaattccttaaaatccatgcgcgcgaagtgagctttgccgggcaaaaggataagcacgcggtcaccgaacagtggctgtgcgcccgcgtgccgggcaaagagatgccggatctgagcaaatttcagctcgaaggctgccaggtgctggagtatgcacgccataagcgtaagctgcgtttaggcgcgctgaagggcaaccagttcacgctgatcctgcgggaaatcagcgatcgcgacgatgtcgaaaagcgcttgcaggcgatagccgctggcggcgtaccgaactatttcggcgctcagcgttttggtattggcggcagtaacctgcagggcgctttgcgctgggccgagagcggcgaaccggtgcgcgatcgcaataaacgcagtttttggttgtcggcggcacgtagcgcgttgtttaatcagcaagttgcaattagattaaaaaaaacggaatttaatcaggttgttgatggcgatgcgctacaattagcggggcgcggaagctggtttgtggcaaccaccgaagagttggcggaattgcaggcgcgggtcgataaccgcgagctgatgattaccgctgcgctgccgggcagcggcgactggggcagccaacgcgacgcgctggccgccgagcaagccgcgatagccgaagaaacgtcgctacaggcgctgctggcacgcgagaaagttgaagccgcgcgccgggcgatgctgctgtatccgcagcaattgtgctggaactggtgggatgatgtcactgttgaactgcgcttctggctgccagcgggaagctttgccaccagcgtggtaagggaacttatcaatacaacgggtgactatgcgaatattgctgagtaacgatgacggtatccatgcgccggggatccaaaccctggcgaaggccttacgcgaatttgccgaggtccaggttgttgcacccgatcgtaatcgcagcggcgcctcaaattcgctcacgctggaatcttctctacgcacgttcacctttgaaaatggcgatatcgccgtccagatgggcacgccgaccgactgcgtttatctcggagttaacgcgctgatgcgtccgcgcccggatattgtggtctctggaatcaacgcgggccccaatcttggcgatgacgttatctattccggtaccgtcgcggccgcgatggaaggccgccatcttggttttcccgcccttgccgtttcgctgaacggctatcaacattacgataccgcggcggcagtgacgtgcaccattctgcgcgcgttaagccgcgagccgctgcgtaccgggcggatcctcaatatcaacgtgccggatctcccctcgagcaaatcaaaggcattcgcgtcacccgctgcggcaaccgccatccggccgaccaggtcatcccgcaaaaagatccgcgcggcaatacgctgtactggatcggcccgccgggtgataagcgcgatgccgggccggggaccgattttgcggcggtggatgaaggctatgtttccgtaacgccattgcatgtcgatttaaccgctcatcaggcacatgaggtggtgaccgattggttagaacgcgtcggggttgatacgcaatggtaagtaaacgtgttgaaagtttgttgaatcagctacgtactcagggcatcgtcgatgagcgagtcctcgaggcaatcgcgcaggttccgcgcgaaaaattcgttgatgaagcctttgaacataaggcgtgggaaaacaccgcgctgccgattggccaggggcaaaccatctcgcagccttatatggtggcgcggatgacggagcttctggaactgacgccggactcaagggtgctggaaatcggcaccggctccggctatcagacggcgatcctggcgcaccttgtgcaccacgtctgctcggttgagcggattaagagcctgcagtggcaggcgcgccggcgtcttaaacaacttgatttacataatgtttcaacccgtcatggcgatggatggcagggttggcaggctcgcgcgccttttgacgcgattatcgtcaccgccgcgccgccggaaattccggccgcgctgatggcgcagcttgatgaaggcggcgtgctggttttgcctgtcggtgaagaacatcagtacctgaagcggatccgtcgccgcggcggcgaatttttcatcgataccgtcgaagccgttcgctttgttccgctcgtcagaggggaactggcctgaacccggattattccaggttttttttgcctaagtttaggcgtagggtggacacatttttcagtgtcctggccgggcgctgcccggtaagcaagatattggcagttaacatattcctgggggataaatgagcgcgggaagcccaaaatttaccgttagccgtattgcggcgttgtcactggtttcactctggctggccgggtgtacaaataccaataatccgcctgcgccggtgaattcggcaagcggcgctgcgtcctccagcaccaattccgggatgctgattacaccgccatcctccggcgcgcagcaagttccaccggctcagccgattcagccgatgcagacccagccaattcagacccagccgacccaggttcagccgatggctcagcaaccggtgcagacggtgaacggtaagattgtttacaaccgtaaatatggcgatattccgaaaggcagctacaccggcggcagcacctataccgttaagcgcggcgataccctgttctatatcgcatgggtcaccggcaacgatttccgcgaccttgcggaacgcaacaacgtcccggcgccgtacgcgctgaacgtgggccaggtgctgcaggtcggcaactccgcaggccagccgatcaccggcgaaaacccggtatctcaggctagcgcgcaagcgagcggcggtgcgacggccaccacaacttctgcacaaaaatccaccgcagtggttgcgtcacaaccgactattacgtattctgaatcttcaggtgaacagagtgctactaagatgttgccgaataataaaccagcaacgaccacgacaacggtcgctccggttacggctccatcaaccgttagcacaacccaaccgactgcaagcagtacgtctaccagttcgccgatctcatcatggcgctggccgactgatggcaaggttatcgagaactttagcggcgcggaaggcggcaataaaggtatcgacattgcaggcagtaaaggacaggctattgtcgcgaccgccgatgggcgcgtcgtctatgccggtaacgcactgcgcggttacggtaatcttattatcatcaaacacaacgatgattacctgagtgcctacgctcataacgataccatgctggttcgggagcaacaggaagtcaaagcggggcagaaaatcgctaccatgggtagcaccggaaccagctcaacaagattacattttgaaattcgttacaaggggaaatccgtcaacccgctgcagtacttaccgcagcgataatttggcaaagtacggataagcgtaacaccatgaaaggcgccagggcggtcgcgatatgcctccttcagtggaggcataaagaggataactccggcgtcgtttagtgatgggtcgcggaaggtgctttgctcagggatcacgggtaggagccacctttatgagtcagaatacgctgaaagttcatgatttaaatgaagacgcggaatttgatgagaacggaatggaggttttcgacgagaaagccttagtagaagaggaacccagtgatagcgatctggctgaggaagagctgctgtcgcaaggcgccacccagcgcgttctcgatgcgacacagctgtatcttggtgagattggttattccccgctgctgacggccgaagaagaagtctatttcgcccgtcgcgcactacgtggagatgttgcttcacgccgtcgcatgattgaaagtaacctgcgtctggtggtgaagatcgctcgtcgttacagcaaccgtggtctggcgctgctggatctgattgaagaaggtaacctcggcctgatccgcgcagttgagaagtttgacccggagcgtgggttccgtttttcaacctacgccacctggtggattcgtcaaacgattgaacgggcgattatgaaccaaacccgtaccattcgtttacccatccatattgtgaaagagctgaacgtttatctgcgtaccgcgcgcgagttgtcgcataagctggaccacgagccaagcgccgaagagatagccgaacagctggataaaccggttgatgacgttagccgtatgctgcgtctgaacgagcgcattacctcagtggataccccgctgggcggtgactcagaaaaagcgctgctggatattctggccgatgaaaaagacaacggcccggaagacaccacgcaggacgatgatatgaaacagagcatcgtcaaatggctgttcgaactgaacgccaaacagcgcgaagtactggctcgtcgtttcgggctgctgggatatgaagccgcaacgcttgaagatgtgggtcgtgaaatcggcctgacccgcgaacgcgtgcgtcagattcaggtggaaggcctgcgccgcctgcgggagatcctgcagggacaggggttaaacatcgaagcgctattccgcgaataaatcgttttctctcaaaaaggcccaatcctgtgattgggccttttcctttgcattaaccgatacgggtttcctgcagatgacgccagaggatttttccctcaatgcgttgaaatatcgccgtggaccagcgcacgacctcgccttgctcaggcagggtctggctttcgcggtagagcaccgcgccgccgtcttgccattcgctcaacacctgcgcattatcaaccacaatgcttaatcccgggcggctgccgccagcactatggaaaaagccgcttaccgtcgggtaatccatcttagcgccgctgataggaaccattgtaaattcttgcgcaaaacggctcatcagcgcttgtgcgctaccttctttccggcccagccattgttcaatgatcacgtgggcgtcgataacttcttggatccatgggttcatgttttctccggattaagctgcaggcaatgcaggcgattactgtaaaccgcgcctcaggggcggataaatgcgcttttcagggatatactgtctaataatttttgacaataagccctattcaaatgctaaacctgcagcgcgttaccatgtttgtcgccgttgttgatgccggaagctttactgctgcggcggcggcgcttgggcaaaccaaagcggtggtcagttttaacgttcgccagctagagagtgaactgggggtgacgttgctgctgcgttcgacgcgccggttaacgctcaccgaagccggggcggtgttttaccagcgtggcgtcgggctgctgaaagccgcggagaatttacaggatgaggtgcgcgccagccacgtcgggttaagcggtgaactgcggatcaccaccaccccggaatatggcgtgcaggtgatcatcccggcgctggcggaatttgctcgtcgacatccggcgctgcgggtgcgccacgtctcatcgtcgcatcatgcggatttgatctctgaacgttttgatgtcgcgatacgcctcggtaccctggccgattcgcgctatcatgcggctcggatttcgcgtttcgccatcgtgcccgtggcctcaccggcatggctggataaacatccgctgcgcacgcttgccgacctggcgcaggcggagtggatagttaatgagcgcttagcgaccccgctgcgctggcagctcctgaccgccgaaggacaatcggtcgcttttgaaattacgcaaccaccgcggatctcagccgatagcgcacaagcgttaatgggctttgcgctggcgggaagcggggtggcgctactccccgagtggctggtggccgacgccatcgcgcggcaggaactggtgcgggtagtgccggagtacatctttccatcgcagggggtatacgctgtctacccggacgcgcagcatgtgccaaccaaggtccgggcatttatcgattttctgcgcgagggaactgcttaatccgcgtttttactttccatcattttcagcaccagccgggagaactgtgcgcgctcctcttcgttaaggcggcttaaaaattcttcatcgacccggttgccctgcggcatggagtttgccagcagcgcctgtccttcattcgtcagatagacaaagcggcgacgtttatcggtcggatcgtgttcgcggcgcaccagcccgcgtttttccatccggcttagcatctccgccagcgtcgctttcgtgctgacggccgcttcgataagcgtcacctgctcgatacctggatgttcggctaccgagcgcatcaccgcgtattgcggcttggtcagttccggtaattcatgttgccagcgcgcggtatgctgttgaaaaagctggcgcagaaggtggaacgcctcgttacgtaactccatgaacactccgtcacaaaaatatcacctttatgatagccgtatttacgctttcttttcacatctcatttttttgattattgatgcgatcgtgtacgaacaatattgagatcccgcaagaatgagcgtagttttaatacaaaggttcgtatacgaacaatgtgtgaggtagcgaatgaaattgattattgggatgaccggggcgaccggcgctccgttgggcgtcgcgctgttgcaagcgctgaatgaaatgccggatgtggaaacgcatctggtcatgtcgaaatgggcaaaaaccaccattgagctggaaacgccctatagcgctcgcgatgtcgccgcgctggctgacttctgccatagcccggcggatcaggccgcgaccatctcatcaggatcgtttcgtaccgacggcatgattgttatcccctgcagcatgaaaacgctggcaggtatccgcgctggctatgcggaagggttagtcggccgcgcggcggacgtggtgctgaaagaggggcgcaagctggttctggtgcctcgtgaaatgccgctgagcaccattcatctggagaacatgctggcgctgtcgcgcatgggcgtggcgatggtgccgcccatgcctgcctattacaaccacccggaaacggtagaggatatcaccaaccatatcgtgacccgggtgttggatcagtttggtctcgaataccacaaagcgcgtcgctggaacggcttacgcgcggtcgggaatttatcacaggagaattagtcatggcttttgatgatttacgcagctttttgcaggcgctggatgagcaggggcaactgctaaaaattagcgaagaggtgaatgccgagccggacctcgccgctgccgctaacgccactgggcgcatcggcgacggcgcgccagcgttgtggtttgataacattcgcggttttaccgacgcccgtgtcgccatgaacaccatcggttcctggcaaaaccacgcgatttcgctggggctgccgccaaacacgccggtgaaaaagcagattgatgaatttattcgccgctgggataaattcccggtaacgccggagcgtcgcgccaacccggcgtgggcggaaaacaccgttgatggcgacgatatcaacctgttcgatattctgccgctgttccgcctgaacgatggcgacggtggtttctatctcgacaaagcctgtgtggtttcgcgcgatccgcttgacccggacaacttcggcaagcagaacgtcggtatttaccggatggaagtgaaaggcaagcgcaagctgggcctgcagccggtaccgatgcacgatatcgcgctgcatctgcataaagcggaagagcgcggtgaggatctgcccattgccatcaccttgggtaacgacccgattattaccctgatgggcgccacgccgctgaaatatgaccagtcagaatatgagatggcgggcgcgctgcgcgaaagcccgtatcccatcgccaccgcgccgttgaccggctttgacgtaccgtggggctcagaggtgatccttgaaggggtgattgaagggcgcaaacgtgaaatcgaagggccgttcggcgagttcaccggccactactcaggcggccgcaatatgacggtggtgcgtatcgataaagtctcttatcgcacaaaaccgatttttgaatcgttgtatctcggaatgccgtggactgaaatcgactatctgatgggcccggcgacctgcgtgccgctgtaccagcagctgaaggcggagttcccggaggtgcaggctgtcaatgccatgtacacccatggcctgctggcgattatctccaccaaaaaacgctacggcggttttgcccgcgcggtgggattacgggcgatgactaccccgcacggcctcggttacgtgaaaatggtgattatggtcgatgaagatgtcgatccgttcaacctgccgcaggtgatgtgggcgctctcctcgaaggtcaacccggcgggcgacctggtgcagttgccgaacatgtcggtgctggagctcgaccctggttccagtccggcggggatcaccgacaaactgattatcgacgccaccaccccggttgcgcctgaccttcgcggtcactacagccagccggttcaggatttaccggaaaccaaagcctgggctgaaaaactgaccgccatgttggccaaccgtaaataaggagaagaagatgatttgtccacgttgcgctgatgagcagattgaagtgatggcgacgtcgccggtaaaaggggtgtggatcgtttaccagtgccagcactgcctctataccttgcgtaataccgaaccgctgcgtcgtaccagccgcgaacattatccggaagcgttccgcatgacgcagaaagatattgatgaagcgccgcaggtgccgcacgtaccgccgctattgccggaagataagcgttaataaaaaaggcccgctaagtcgggccttttttatattaatggagctacgccaggcttttcaggcggtagatccactccagcgcctgacgcgggctcagcgaatccgggtcaagattctccagcgcttccagcgccggtgaggtctcttccggcgcggagagcagcgacatctgcgtaccatcaacctgcgtggcggcggcatttggcgaaatgctctccagctcgcgcagtttctgccgcgcgcgcttgatcacctctttcggcacccccgccagcgcggcgaccgcgaggccatagcttttgctggccgcgccgtcctgcacgctgtgcataaaggcgatggtatcgccgtgctccagcgcatcgaggtgcacgttggccacgccttccattttctctggcagctgggtgagctcgaagtagtgggtggcgaacaaggtcaacgctttgatcttattcgccagattctccgcgcaggcccacgccagcgacagaccatcgtaggtggacgtgccgcggccgatctcgtccatcagcaccaggctgtgttcggtggcgttgtgcagaatattggcggtttcggtcatctccaccatgaaggtggaacggccgctcgccaggtcatccgccgcgccgacgcgggtaaagatgcggtcaatcgggccaatttctaccttctgcgccggcacatagctgccgatataggccagcagcgcaatcagcgcggtctggcgcatataggtacttttaccgcccatattgggcccggtgatgatcagcatgcggcgctgcggcgccagctgcagcgggttggcgataaacggctctttcagtacctgctcaaccaccgggtgacggccttcggtaatgcgaataccaggtttatcgataaaggtcgggcagcagtagttgagggtttccgcgcgctccgcgaggttcaccagtacgtccagctcggccagcgcgctggcgctggtttgtaagtcggccagatgcggcagcagtttttcgaacagttcgtcatagagctgtttttccagcgccagcgccttgccttttgaagtcaggaccttatcttcgtattccttcagttccggaataatgtagcgctcggcgtttttcagcgtctggcggcgcacgtagtggatcggcgcatgctggctctggccgcggctgatctggatgtagtaaccgtgaacggcattgtagccgactttcagggtatccaggcccaggcgctcgcgttcgcggatttccagtttgtcgagataatcggtcgcgccatcggccagcgcccgccactcatccagctcttcattataacccggagcgataacgccgccgtcacgcaccagtaccggcggcgcatcgatgatagcgcgctccagcaattcacgcagttcggcgaactcgcccattttctcgcgcagctgttgcaccggctgacagtcaacgtcggccagcagctcgcgcagcagcggcagctgctggaaggcatggcgcatacgggctaaatcgcgcgggcgggcggtacgcagcgccagacgcgccagaatacgttcgagatcgccgacctgacgcagcaccggctgcagctcggtataacgttcctgtaaggcgccaatcgtttgttggcgttcaaccagcaccgcggtatcgcgtaccggcatatgcagccagcgtttgagcatgcggctgcccatcggcgtgaccgtgcagtcgagtaccgaggcaagggtgttatcaacgccgccggcgagattctgggtgatctccagattgcgacgggtggcggcatccataatgatgctgtcctgctggcgttccatggtgatggagcggatgtgcggcagcgaggtgcgctgggtatctttgacgtattgcaacaggcaaccggcggcgcacagcccgcgcggggcgttttcgacgccgaagcctaccagatcgcgggtgccgaactgcaggttgagctgctggcgcgcggtgtcgatttcgaactcccatagcgggcgacggcgcaggccgcggcggccttcaatcagtgacgattcggcaaaatcttccgcatatagcagttccgccggattggtacgttgtagttccgccgccatggtctcgcggtcggccggttcgctcaggcgaaagcgcccggagctgatatccagcgtcgcgtagccgaagcccttgctgtcctgccagatggcggccagcaggttatcctggcgctcctgcagcagcgcttcatcgctgatggtgcccggcgtgacgatgcgtaccactttgcgttcaaccggccctttggtggtggccggatcgccaatctgttcgcaaatcgcgaccgactcgccctggtttaccaactttgcgagatagttttccaccgcgtggtggggaatgccggccatgggaatcggttcgcccgcggaagcgccgcgtttggtcagcgagatatcgagcagctgcgaggcgcgtttggcgtcgtcataaaacagctcgtaaaagtcgcccatccggtaaaacagcaggatctccggatgctgagccttcagcttcagatactgctgcatcatgggcgtatgggcgtctaaattgtcgattgtgctcatagggtgttatccaggtccctgatttttaatagagtgcgattttattattgtcgtcgttatcgcatgaggaagacatgataacggagataggcatttgagggaaagtgacgaagtggatgcagcgatcctgattccacttctcgaacgcgcggccatcgctaagctggccgcgcgtgacgttcagggcgccagataaacctgcggaatcgctttttccggatgctggccgagacgcacgtccgcgccgtaccagcggttaatgatttcctgctggataacctgatgcggcgtgccctgcgcgaccacctgtccctggtgcagcagcagaatctggtcggcccacagggcggcgaggttgagatcgtgcagcaccacgcagacatgtagctggccggaagcggtcagccgcttgagcaggcgtaacagatgctgctggtaatagagatccagcgccgaggtgggttcatccagaaacagccagccctgcggcgcgccgtcttgccacaattgcgcgaggcagcgggccagctgtacccgctgctgctcgccgccggaaagcgacggatagcgcctgccgcgcaaatgatcgcagccggtttccgccataatatcgcgcagagtctgcggactggcggtcgcttcccatggcgagcgccccatggcgataaccgtttccactgtccagtcggcctggagtggagtgcgctgcaacatcaccgcccggcggcgcgatagcgcctgcggcgaccagcgttccagcgctttgccgtccattctgcgctcgccgctatccggggtaaggtagccggtcagcagccgcagcagggtggatttgcccgcgccgttcgggccgatcagcgcggtcatctcgccgccgcgaagcgtcagcgaaacctggttaataacctgtcgttggccgagccgcagcgacagcccttgcgcccgatagtctttatccatggattggtttctcccgacgaaatatcagccacaggaaccacggcgcgcccaacaggctggttagcagccccaccggcatctccgccggcgcggcgacggtgcgcgccagggtatcggcaatcagcagcagaatcgcgcccgccagcagcgatccggggataagtccgcggtggtccgcccccagccacattcgcatcagatgcggcaccaccaggccgataaagccgatgacgccgcttatcgccaccgccgcggcgaccagcaccgcgctgcataacaacagcagccgctgtagcgcccgcacgttaacgccgagatagtgtgcctcttcatcgccgagttgcagcagattaagacgtgttgccatccgccacaccgctattgacgccggaataatcaagctggccgccaccagcagcgtcggccattcggcctgacccaggctacccattccccacagcgacagctggcgtagctgagcatcgttgcttagccaggccagcacgccaaccagcgcgccgcataaagcgttgatggcgatccccaccagcagcagccgcgacagcgaaccgtcgcctgcgcggctgaggaaaaaaatcgccaccatcaccgccaggctgccgataaacgccgccagcatcggcatatacagggctaacagcgccggcacgctgagcggcagcaccagccagcaggccaccgccagcgccgcgccgctgctgatgcccagcagccctggatcggcgagcgggttgcgaaacagcccctgcatcacgcagccggacagcgccagcgcggcgccgaccagcagcgccagcaacacccgcggcagacggatcgtcagccagatatggcgcaggatttcatcgccggagggcagcaggttgatcaatggcaatcgcattgcgccgagggtggtggcgtagagcgtcaatgcgaccagcagcagcgtcatcaacagcagattgcgaacgagggcagggcgcatcagggcaactgctccgcttttttgcgcagttcgaggatcgcctgcggcgtacgcgggccgaagccgagcagggccatatcgtcgatcgccagtagttgtttatggcggccagcgggcgtttgcgccagaccgggcagtttccatagcccgctttcgccgcccatccccttgagaccatcggcggaaatcaccaccagatccgcctggcttgcagccaccccttcctgcgacatcgcgcgataatggtcaaaatcctgcatcgcattttgcagcccggcggcgcgaatcgcgccatcggcggcggtgtgctgcccggccaccatggtattcatcccgccgtggctgaggataaacagcacccgtttggcgataggccgcgtgggaatggcggctatctgctgctggacctgctggcgcagcacgtcgccttctggagttttatctaatgctttggcaataacggcgattttgttatcgatggcggcaaggttatcgccgcccggcacgttgacgaccgtcaccttgctgtcctgcactttctgcagcaccagcgacggctgcgcctgcgcgctggccagtaccagctgcgggcgtaaggagagaatcccctcggcgtttaactgccgtagatagccgacgtccggcagcttctgcgcggcggcaggccaggtgctggtgctgtctttcgccaccagttgctgcccggcgttcagcgcgtagacgatttcggtaacgtcgccgccgagggaaatcacccgttcggcggccgcgctggcgaacagcggcagtgcggcaagcagtattacccaacgcttcatgccggctgcccttccgcgcacagacgctccacctgcgcgcgccactgttcttgctcggggtggccttcgctacgctggccgtacagctgggcgatttgcgtaccgtctttggcaaacagttcgacgctggtgacgtggccatcggaggtcggtttacgggtgacccagatctcatccacgctgtcttcgcgcagatgcagggtgaaggcgctgttgaagatgttgatccagccgcgcatcggcgccagcttttccagcacgccggtgaagatctgcacgcagccgcggttgccgacgaagatcatgatttcattgccgtcctggcgtaccgtttccagcagtcccggcagcgcattattgtcgatgcggcaggccagatcgtcgctcaccaggcggaaggcctgctgacgggaaagattgtgtttacgcagcaggccaaagaactggtgcacatcggtcatcgcgcgccactcgttttccagcgccgcggcgtcggcggagtcggcgtactttactcggtcggccgggcgaatcgtcagcgcgccgggcgccgtctcgctgaatttggctatcagcgtttgccatgccgccatatcggtttgcccggtggcatagacctttagcagggcgtcgccgtgcgggtcaaagaactggatgctctggcgaccgttatcgttgaggtggaacacgctcgaccactggctgaggaacaggcgcaggtcgagcgcccgcgggttgagcaccagcccggcgtggccgctcaggtgttgatgggtaaattcgccgacctgctcgtgcaccgcgtattcgttgcggcagatgcatttggtttcgccgacgctctccagggcggcgataatcgcccgtacgtcgtcgtgcagacgcacggcatcgtgaccgacgcgcgcggcggttaattcggcttcgctaattcccatctctgcggcgatgtcgcgggcatatttggcggtggagcgggctttggtggcctggtagcgctgccacagatcgtcgtgtgcgttttgcataatccacatccttctctacgatgaatatccccggcccgcgggccggggtgcaggtttgttattattcgggcgatcagaaatcgatattcacgcccagttgccaggtccttccgggcatcacagccagcgctttatcgttggcatcctgattggtactggtctcgatgttgcggctgctcaggtagtcccagtatttacggtcggtaatgttgtaaaccccgccgttgaggcgaacgttcttcgccacctgccagtaagcggtccagtccagcatgccgtagcccggcacgcgcacatactcggtgctggaatcggcgatggcggagccggtgttgttgtagctctcgcggctggtggcagtggcctgtttacccttaacaaaggtggcggtcagcgccgtaccgtagcgcttagccggatcgtcccacgccacgccgacgatcgctttcatcggcgcgacgctgtcgaggtcgacgtatttgtcgccgtagtagctggatttcgatttcccttcgctatagccccaggcgagggtggcgctcaggccatccacctgctcaaaccatgtgccgaagttaaatttagtgctgatctcgccgccgtagatataggccttatcgcggttttccgcttgataaatggtgtaaatattcgacgggacgttagtgaatttgcccggattgttggcgcgcgaataacgcgtataggcgataaagttcttatagctgttgtagaacagcgcggtacgcacggtgatgccttcggtgacttcgcccttgataccccattcaatattgtcgctggtctcggttttcagatcgttgttgccgattagcgcgtactgctggctgccggcatagctggagcccaggttccacgaaccatacagctggctggcattcgggaactgcgcgccgcgctggtactgtagataggtcatcagccgcggcgtaatgtcgtactggaacgccagtgacggcagcacctgggtatcgctgtttttaccatacagattcgctaccgacgattcggtgagcacgctgctgttggcgctaagatcggacagatcttccggtttagtggactgatgcgtcacgcgtacgccgggaataatcgcgaagttgtggctatcgagatcgaagttgatcttatcctgaatatagccgccgagggtgtagctacggctgtccgcttccggctgcataatttcgctgtagacgctggggatcggcgactggctaaatggccgctgggttttggtcgtgctggcgttaaaaccggcgctcaggtcgtggcggccgatgcttttcgcgagcgcggtctgcaggccccaggtatcggtatcgtagtcggaattgaccgtctgcattttgcgggtgacgctatccggcatccaggtccagtcgtgagcctcggtatgctggtagtaaaccttggtcgagacgctgtcgatgtaatcgttcatcggcgtccagtcgtctttcaggctcagcccccagcgccgcgtctggttggtttggttggcggtgccgatctcgctgttaccgctggagtcccacgaatcgaagtggctgtggttggtcttgtgatagtagtcgaaggtgctggtgaacttatgttcatcgttcggctgccagatgccggaggccataaacgcgtcagagtgccagtttgccgggtaagcgtcgacgctgccgctgttgttctcggtttcctggccatcgcggcggctgtagacgaaaatgccgcgcagcgtttcatcgccgccggcgacggtgacgccgttatgccagctgcggtcggaagagtcgtagccgctctgatagccaaaggcgctggttttgcccgggcgcagatagtcatccgccgatttcgggcggaaggagacgttgccgccgatggcgctgttagcggtctcggttgaggtggcgcccgactgaatatccacgctgccgtacatataggggtcgatataatcgcggccaatgccaaaggtgttgaggccggaacggccaacgtagccgcggccggtggcgttcggctgggcaatgccgtcaacatcgatgccgacacggttgctttcgaggccgcggatgttgtagccggtatagccgccgcgatcgaaaccgcttttaccgttgccggaaccgccgctggcgccggtggcgctgatgaggggttcataacgcatgattgagccgaagtcgttggcgcctttgtcctgcagttcctgcgcgctcaccgagtgctcgctgccggctttcagctgtggggccggggcggtcaccaccatctgttccgcgctatccgtcgtgttatcctgggtcacggccgcgatagcggcattctgcgcgattgctgcgagcagagaagttgccagcaggcttttcttacaccatgctgctgattgagtcgatttgtacatttgtagccacgccttgataattattagtatcggctcacgcgttacttccagagtgcaggttggtccgtgttttccctggcggacagtggtattcctgatttagtaattgcgaatggtaatgataggtattatcgtttgcaacaaaataatcatctattctgaattttgtttacattcgtgcggaggggagcaagccaacatgagccataaagcgatgattaccattcactactgttcccaatgcaactggatgctgcgtgccagctggatggcccaggagctgctgcatacctttagtaccgatatcgcttcggtcacgctggtgcccggtaccggcggcatttttacggtgagcgtcgatgaggcgctcatctgggagcgcaaacgggacggcggtttcccggacgctgccgagctgaaacggcgggtgagggacgtctgcttcccggaaaaagcgctgggacacgtggataatgccgggaagcagatctaaaacggctggctgcgattaacgtcctagttcaacgttgaccagtacgctttgtcggcgagtgtgaataatagcgaccgcctcttccagtacgccggggagatcttccgccagcgaaaccgtcagcgcagccgcgcggctggaggcggcgagcgcggcgaaatctggcgacgacgagaacgcggtggccgggatagcgtccattttagcggcatagccgtcgggatagagcgcccgggtgccgcccgctaccgctccccagccgccattgttgccgaccaccaccagcacgggaagcttcatcacttccgcgatgtgatgacatacagccggattggcaaagagataggagccgtcgcccacggcggcgatgataagctcgcctcgccgggcgagctgcagccctaaggcgatgggcaacgcctcgcccagaccacccgccagcgcttcctgataataactgtccgcctgagtcaggccggcaaactgcggcattgttgtcagttcagagacgatcttcccctgatgttgattggcaagctggcccagacagtagctcagccagggtttgccaatcgccccttttttaccggcgtggaggagggcttcacgttggttcttcgcgtgttgtatcaggctaagcacatgcttttcacgttcagccacctgctgttgcttcgccgccacaagcggctggagcgcctcttgtaaaagttcgaatacctcgtcggtttctccggccaggttaatatcggcgcgataaccgcggacgggatagcgggaaaaaaggggatcggggccgatctggatcaccttacagctgtcgttgcagcggctttcttcgatgatccacggggcctgtgagtcgataacgatgatgacgtcggcggcagaaagccagccttcgggatcgctgccggccagcataggattgtcgctgctaagggtgacttcagtaccccagtattccaccaccggaatagcccactccttaaccagggtattgagccgcgcaaagcctccagccgttctcgcgccacgctgggcgaagatgaccggctgtctggcattggctatcgcatcggcggcgctggcaatatccgcccgcgttggcgcgtagcgtaccggctgctgggtggggaggcataaagcgcttgttcatcgatcgtgaacgtttcgcatagcggctcgcgcggcaggctcaaatacaccggcccctttggcaatgaacgggctatcgcccatgctctgtcaacatgctcgccgatctgatcggcaatgcgtaattcaaagtcccatttcaccgactcgcgaatgagcgccgcctgatcgcgcatctcctggccgtagccaatcggcgtgttgcgacaaccaaagtgtgaatgctcgctaatcggcgtacgtccgccaaaaatcagcaccggaatattgctgttggccagattgatgacgccgcaggcggcattggccaggcctacgttagtgtgaaccatgacggcctgcactttaccgctcccgagataatagccatgggccatgccgatggctgcgttctcgtggggacatatcaccagctccggtacctgttgtcccgtggcgcgcattttggcccacgcttcaataaccggggataatcggtacccgaattaataaaaatataggccacgtcgagggcctgaagccggtgcagtaataattcagcggccgataaagtgatagaagtcatattctctccggattagcgcgatgttatcgccgtgattaaaaggtcaggaaaataaatgcgcccatcgtaatgatggaagtaataatacttagcgccatggtcgaggccatttcttgctcgccggacttatattgcatagcaataataatggcgatcgagcccacaggaatcgccatcgttaataccacttgttttatttgctctatgctgaaacccatttttaacaaaatgaggtagcaggcgccgggcaccagaatattacgggcgatgacggtaataatggtggcggaggtgatgacaatgctgcgagtatagagcacgatgcctgcggcaaacagcgccagtccgccggaggccttacccagcagacctagcgacattgatacggtttctggaatatgaatatccattaatactaatatcagcgcgacaaccggcgaccataccaccggctgcttgatggcgttgatgacccgcgtggcaaaagagatattctggcttttatcccccgttgcaacggacatcagaatcatcaccagcgggagctggaagacattttgcgtaatactggaaacagtaattagtgaggcgctgacggtgccgaataaaaaagccagtaccgaggtgccaatgaagggaactgcaggcgagccgatggccagagcctgtagggtactgagcgccagggagcgtttacaaatataacgggcgatagctaagggaataaggaaactcagaattagcgccaggataatggcgatagcgaccggccccatgctcatcacgatatgccgcggcgtcatgaccatattactgaaaatactcagcggtaaagcatacagcatcacaattttattaatatcaccagcctgctgccagttgaagtctttgcgtttaccgctgatatagccaatgagaacggtaatgataacgggtaaaatagcgccgaggattaatagaatgttgttctgtgtcatagtgatttattctcattataaattatcgttagggtcagggtgttgatctataaatattaagagtgcttcccacggaaatgcgccgctgttgcactattctttttttcgttgcttactgcattcttgacgcaaaaagaagcgtcagggaaatgtaaaaataattcgttcaatgagtaattgtcatggctatgaaaatgaaacagatacaagcctttctgaccgtcgccagcgaagggaatttaaccctggccgcggagaaaatggggattacgcaatccggactcagccgattattgctgaccctggaggaggatctgaatgccaccttatttgaacggcataagcatggaatggcgttaagcgagtatggcagcgcgtttttaccctatgccatgacaatgttgaacacggagaacaaggccagagaggaaatggcgctgatccgcggggcgggcaaggggattttgagaatcggctgcgtatccagtcttttaaccagccattttattgataaattagccgcctttcataaatgccatccccagatacacatcaaaatattcgaccgtatagactcagagttgtttaagctgctgctgatgcatgaaatagatatcgccctctgcgggcctttaccgcacgacgataaaatcgtggttcgtggaaaaattaactggcaggaccgtatttgcatcatctcgaggccagatcatccattgcaaaaggccaggcatttgtcgcttgcggcgatgctggattatccgtggatcatgccgccgccattaagcacaccgatgcttatccttgaagatatttttcgctcgcatcagttaccctgtccggttcctattatcgagtgcgcttcatccgcggcgataaaatcctttatcgctgagagcgatcttttaacgtcaatgcctgcccccgtttatcgactggaagagaagcttggattgttgcgcccgctggaggcggagggcagcgtgtttgtcagagatttctatgcctggagccattttggcgtgttatccggagccgcgctgcagttaatccagcatctgaagcagtgagatgccctgacagatacaaaggtgtataataaatgcattttattggcttgaggctgtgacatgggtaagcgcatcgaacgtgaaaaaaagactatcagctgtatgattcggctgtatcaacgccgctgcccggacgcccgcgacgaaggtgaacattaccaggcgcttaatatctacgccgacaagcggctggataagtgcgtatttggcgaagagaagccggcctgtaaacagtgtccggtacactgctatcaaccggcgaagcgggaagagatgaagcagatcatgcgctgggccgggccgcggatgctctggcggcatccgattctgaccattcgtcacctgcttgacgacaggcggccggcgccggagctgccggaaaaataccggccgaaaaaatagcggcctttccacggtttgcgctgcgcttcgccgccaccgggatcgcggttgaaggatcgtaggtcggataagcgtagcgccatccgacaattctccctgctcgcgctgcgcttagcagggctacagctcctggcattcgcgttttttgtcgctccgctaaggcgttagccgccaccggggagcgttgctgacgccctctgtttctgaccgtcacggaccgtactggcgacaaaggccagcacgaacagcgcggtaaatagcaccacgatggttggcgccggcgcgctatcgagataaaacgacagccagacgcccgccagcgaacagcccacggcgattaccgttgccagcaataatgcgctgacaaagcgccgcgtcagcagcaaagcgatagcgccgggggcgatcagcagcgaaatcgacaggataatccctaccgattttaacgtcgcgacgatagtcagcgcgatcatgcacagcagaccataatgcagcagcccgcagcgcaggccgctggctttggcctgattgggatcaaaggcgtgcagtaaaaaatcgcgccactttagcccgataatcagcgcaatcgccagcgcaatcaccgccgtttgtccgatatcgctggcggatatccccagcatatcgccaaacagaatgtggtcgagatggacctcggattgaatcgccacgtacagcaccagcccggcgccgaacatcccagagaagacgatccccataatggtatcgcgcttgatgcggctgttatcgtcgagaaaaccggtggcgacggcgcagaataagccggcaataaacgcgccaatggcgaagggaatgccgataatgtaggccaccaccacgccgggaaacaccgcgtggctcatggcatcgcccatcagcgcccagccttttaacaccagaaataccgacagcagcgcacagggacggcgacgatcgtcgccaccagcatcgcgttgaccataaacggaaactgtaatggttcaaggagcatcgttagcatgaggcctccctggcgcggcggcggttggccagcaggccgtgcttcggcgcaaagacaaaggtagctaagaacagcagcgtctgcgccaccacgatgatgccgccggtggcgccatcaagatagtagctcagccacgcgccgaagaagctggtcaggctgccgatagcgacggcgatggccagcagacgcgggaagcggtcggttaacagccaggcggtggcgccgggcgtcacgaccaggcagatgaccagaaacgcgccgacggtttgcagcgccgccacggtgcaggcggccaacagagtgaagaacagcagcttcaggccgctggtgttaaggccaatcgagcgggcgtggttttcgtcgaagaaggtgaccatcaggtctttccacttcagcaacaggatcgccattgaaataaagccaatcgccgccagctggataatatcctccggagcgatggcgagaatattgccgagaataatggtttgaatgttcaccgaggtcggattcagcgacaccataaacaggccgatgccgaaaaacgaggagaaaattagcccgatgatggcgtcctcttttagccgcgaacgctggttaagaaacagcatgctgcctgccgccaggccgccggagagaaacgcgcccagcgcaaagggcaggccaagcatataagcgccggcgacgccgggaacgatcgagtgggagagggcgtcgccaatcagcgaccagcctttgagcatcaggtagcaggagagaaaggcgcagacgccgccgactaatgccgagacccacatcgcgttgagcatgtattgatagccaaacggctccagcagccagctcatcgttggcccccgccgcgcgatggctgataaacggccgctcatcgtcggtaataatgcgctcttccgcgccggtgagcgtgacgtgacgcaacacgccgctgaaggccagctccaggttctcggcggtgaaggtggtctccgtcgggccgctggccagcacggtgcctttcaccatcaccgtgtaatcgcaaaattcgctgactgaaccgaggttatgagtagaaaccagcatggtgcagccttcgtcgcgcagttctcgcagcagggcaatgatccgcgcctcggtttgcacatcgacgccggtaaacggctcatcgagcaggatcactttgccttcctgagcaatggcgcgggcgaggaacacgcgctttttctgcccgcctgagagctcgccaatttgtcttttgcggtattcgctcatccctacgcgggccagcgcggcatcgacaatctgccggtcgcggggcttcgcccgccgcagccagcccatatgaccgtagcggcccatcatcaccacatcttccaccagcaccggaaaagaccagtccacctcttccgattgcggtacgtaggccacaagattttgccgtagcgcgcggttgaccggctggccgagaatggcgatatcgccgtggccgacgcgcacgaaccccatcagcgctttgaacaacgtcgatttaccggagccattgacccccaccagcgcggcaatcgatccgcgcggtacgctgaacgatgcatcgcgcagggcggtgtggccgttgcgataggtcaccgtgacctggtcgacgataagtcccgcttgcggcgcaatcatgactgtttcctcaggccatcgttgatccctttgacgatggtttcggtggtgacgcgcagcaggtcaagataggtcggcaccgggccgtcggcggcgcttagcgagtcaacatacagtacgccgccatagtgggcgccggcttcacgggcgacctgtcgcgccggtttgtcggagatggtgctttcactgaagatggtcgggatatgctccttcttcatggtgtcgatggttttacgcacctgctgcggcgtgccctgctggtcggcgttaatcggccacagataacgctcctgcaggccgttatcgcgcgccagataggagaatgcgccttcgctggtgaccagccagcgtttgtccgccggcagtttcgccagttcggccttcagcggcgccatggtctggcggatcttctctttgtaggcctcggcgttacggcgataggtgtcggcattggcgggatcgtatttcaccagcgcatcgcgaatgttatcgacgtagatcagcgcattatccgcggacatccaggcgtgcggattaggtttgccgttgtaggggccatcgctgatacccattggctgaataccgttgctgaccacgacttccggtacgccgttcaggtgctgataaaaacgggcgaaccacagttcgaggttgagaccgttggcgagaataagcttcgcccctgcgcgcgtttgatgtcgcccggcgtcggctgatattcgtgaatttccgcgccaggcttggtgattgagctgacatcggcggcgtcgccggcgacgttctgcgccatatcggcgatcacggtgaaggtggtaatgactttgaatttttcttgcgcctgagcgggggcgatggcaagcagcgctaatgcggcggagaacaacaggtgcttgaacggcgacagatgcgtcataggatccctcacggtattgcgattaattaatcatcgtttatagcctttgctatgttatatagcacaagctatttataaatgaaaataattcttatttagatgtgggggtaatgattaggctgagaagggatttgggagtgaggggtaatccgggtttggtccggtattcgatggggcgccgcgttattttgtcggatagcgctacgcttatccgacctacagtttatgcgcgatttggtagcccggagaaggcgcaatgcgccgcctccgggagaatccccacgctatgagagacatatcgccgggctagactaaccgatccttattaatgcctaaacgcttcatgcgcgacagcagcgtcgtgcgcttgagccccagacgttgggcggcgccttttggcccggccaccacgccgttgctctctttcaatacccggacgatcagctgatattcatcttcgccttcctccggcagcacttccggcgccagcgtttcctgttcaatatgcatttccggcagcgacagttgcagtacgttgccgcgggttagcaacaccgcgcgctcgacgacgttttccagctcgcgcacgttgcccggccattccatgcgcgaaagcgtgcgcagggtctccgccggaatactgtcgatgttgcgcccagacggcgggctattttgaaggtgaacgctttcaccagcagtggaatatcgtccgggcgttcgcgcagcggcggcaggtggatcgggaacacattgagccgatagtaaagatcgctgcggaattcacgatcgataaccatctgtttgagatcgcggttggtggcggcgatcagccgtacatcggtctgaatcagtttattgctgcccagacgttcgaattcctgctcctggagaacgcgcagcagcttcggctgcagctccagcggcatatcgccgacctcatcgaggaacagcgagcttttgtccgccagttcgaaacggccgatgcgctgggcgctggcgccggtaaaagcgccgcgctcgtggccgaacagatcgctttccagcaggcccgcaggcatcgccgcgcagttcattttcaccattcgccggccgttgcgcccgctcaggttatgaatagcgcgggcaatcagttctttaccggtgccggtttcaccgaggatcagcaccgtactgtcgctctgcgccaccatctccacctgtttgagcacgctgtgcatcgcttcgctgcgaccgatgatttcgccgaactcgctttcgacgttgttgagctgttcggtgagcgccaggttttcatccaccagccgttctttcagccgctggatctcgcggtaggcgagggcgttatcgatagctatcgacacgcgctcggcgatttgccgcagcagcttaaggttggtggtggtaaacacttgttcatcgcactgcgccagcttaagcaccccgagcagcgtattgccggacatgagcggtaacaggcacagggtctggatctggttatcccacatctcgaagagcattttctcatacggcgccagcgagtcatgttcgtgcagattgagcaacagcatctctttgctcttaaacacccgctcggttagcgtgcctgcttcatcgacttcgctttggtcgtggaccggatggctggcgtcgagatagtgggtagagtagatgttgagcttgcctttgcggttgctgcgcagcaccacgctgatcgcgtcgatacggaaatagcggtggatctctttcgccacctcgctgaccagttcgtcaatatcgaggcgcgacaggacggcgttggtgatggccaccaggatgcggaagttatcgcgctcgtggcacagcaggtcgtaatcgacgttgttgctgacccggttttggatctgctcggtcacgacggcgacaatctgcgcgaaagtatgcaggcgctggtactctttttcgctccatggcctgttgtcgtcgcggatgaactcacaaccgccgaagatgcggccttccgccgccagcggcagcagacagtagtaaccgaattccgggtaaatgccgctggcggctagctgcggccaggtttcggcgaaggtcgcgttatcgcaatgtagcgcgtcggggcgcgacagcaggcggcgtaccggaccgtgcgccagtacggtttcatcttcgtagcttgccggctgcccggagtcgtcgcaggcgtacctggcggcgcgatggttgccgtggttccacaagatgatcgccgcccggtcggcaagcgcggattgctgcaccagacgggttagcgtttcgctcagcgcggccagatcgggctgctgtaataaaatacgggtgatatcaaacagaccctgctgcccgagatcgcccattggtgtatacgacattgcttaagtccaaaaagcgccgcagcgcggcgcagaataaagagatgaatcaaataatagtctgttaataaaacaattgttgccgccgttgaggtcgccctgatatggcgactgccaccttccgggcccgttcagtcgttagcaaattcttggcagcggctcggcgtggggaagatcgagtgtacgtttaacgccatataacccgacagagcgcacgccggcgcgctcgacaacgtcgccaattatcgcggcattctgtccgagcgggtgagaccgtaaatgctcaagtacgcgcggcgcggcttctctggcgacggtaatcaccagtttaccttcgttggcgaaattcagggcgtccagccccagcagttcgcagacgccgcgcaccgtatcgttgaccggcagcttcgcttcatgcagttcgataccgcagccgctggcggcggcgaactcgtgcgccaccgcgttgacgccgccgcgggtggcgtcgcgcagcgctttgatgcccggaatctctcgcagggtctggataagcggcgtcagcaccgcgcagtcgctggataacgcgccgtccagccccagctgttcgcgcaggttaagaatggtggcgccgtgatcgccgagcgtgccgctgaccagcagcacatcgccggcgctaatctgctgcgctccccagtgaatatcgccggggatggcgccaataccggcggtattgatgaataatttatccgcggcgccgcgcggcaccactttggtatcgccggtcacaatggcaatcccggcctgctgagcggtagttgccatgctgcgcaccaccgcttccagcgtcgccatctccagcccctcttcgaggataaacccgcaggagagatagcgtggcacggcgccgctgaccgccacgtcgttggcggtgccgcagaccgccagcttgccgatatcgccgccggggaaaaacagcgggtcaatgacgtagctgtccgttgagaaggccagccgatcgccctgggcggcaagcccggagagatctaaacgcgcctgatcttcctgttcggccagccagggattggcgaaggcctgcataaacagctcgccaatgagttgctgcatcgcctgaccgccgctaccgtgagctaactgaatgcttttcatgctttattttcctgactgcgatattgataccaggcggcgcaggcgccctctgaggagaccatcagcgcgccaaaggcgctctgcgggttgcagacgcggccaaacagcgggcactggtgtggtttacaacgcccggtcagcacttcaccacagcgggcgcgcgggtcatcgcaaacgcgctgcggcgccgggcggaaatgggcctcggcgtcaaagcgttgataatctggcgtcaggcaaacgccggaatcgttgatcgtccccaggccgcgccattcgctatcgccgctcaggcaaaagacctcggcgattgccgcctgcgccagcgcgttaccggcatccggcaccacgcgacggtactgattctctacctgactgcgctgcgctattttctgctcaaccagcatgatcacgccttgcagtagatcaagtggttcaaatccagcaacgactaatggccgatgatagtcgctggcgatgaaaccataggcgtcggtgccaatcaccatactgacgtggccgggggcgagaaacgcatcgataccgttgtccggctggtccagcaggctgcgcagcgttggcagcaaggtgatgtgctgacagaaaaagtaaaagttgtcgacgttgcgctcgcgggcctgacgcagcgtcagcgcggtggcgggcatggtggtttcgaaaccgagaccgaaaaacaccacctcgcgctgcggattctgctgcgccagccgcagggcgtccatcggcgagtaaacgattcgcacatcggcgccgcgactcttcgcctgcagcagcgacccgttttttcccggcacgcgcatcgcatcgccaaaggtgcagaaaatcacccccggacggctggctatctcgatacacgcatcaatgcggcccatcggcaggacgcacaccgggcagccggggccgtgaataaattcaatattgttcggtaatagctggtcgaggccgaatttaaagatggcgtgggtatggccgccgcagacctccatcatccgcagcgggcgggcttcactgtagtccagcagccgggctcgctgccgcagatgttcgaccagctgcagcacctgctccggcgcgcggtactcatcaacaaaacgcattatcgctcctcgccgtacagcagcgcgccgacgtccggttcaacctcgaacatgttttgcagcgcctcgagggtatcgcgcgcttcggcttcgttaatcacgctcatggcgaacccgacgtggaccagcacccactggccgatgcgcggctggccctgttcatcgacggcgccgaccagcgtcagatcgacttcgcgctgaatgccgcacacttcaaccttcgccatcacgccgtcaatcgtgcgaatttgccccggaatgcctatgcacatcgctgcgtctccagccagttaagccactggtccatgccttcgccgctggtggcggagagcaaaataatctcgatatgagggttcacttcacgcgcgcaggctaggcacttctcgacgtcaaagttgaggtacggcagcaggtcgactttgttgagcagcatcaggctggcggcggcaaacatatgcggatacttcagcggtttatcttctccttcggtgaccgacagcaccgccactttatgacgttcgccaagatcgaagctggccgggcagaccaggttaccgacgttttcgataaacagaataccgttatcgccagccggcaggcgcgcagaggcgtcggcaatcatttgcgcatcgagatggcagcccttgccggtattgacctgaatcgccggcgtgccggtggcgcggatgcgcgcggcatcgttgaccgtctgctgatcgccttcaatgaccgcgcagtcgacgatgcctttcaggcgggtcagggtttcggtgagcagggtggttttaccggagccggggctggagaccagattcaataccagttggttatttgccgcgaagcgcgcgcggttgcgcgccgccaggcggttgtttttatccagaacgtcgatttcgacttccagcatccgccgttggctctggcccggcgcgtgggtacccgcttcgccgtggccgtaatgcagatcgccttgcgcgctgcgggtcggggagaagttatcggttttcacgccggtgatggtcatggtctggcgcggggcgggggcgaagggggcgctgcgaaacgccgagtgcgggttatgctcatcgccttcgatataaaggttgccttctccgcagccgcatgtcgtacacataatcttttactccaattctaaacgctgaatctgtaagccatcatccgccacgatctgcaactggtcgttatcgcagtgcgggcagcggcggacgtgctgagagacaagatgcacatactgctgacagcgttcacaccagcattcggcctgttgctcggcaatgtgcagcgcgcagccttccgccagcgtgccgcggcacaccagttcaaaacagaaggtgagggcgctggcctccacgcaggaaaacgcgccgaccttcagccacacgccggtgacccggcgtgcgccgttttgccgcgcctgttgctcaataatttccagcgcccgctggcttagcgtgatttcgtgcatgttggcctccgttaatactatggcggctatatgcaataacgatgccaggagaccataaaccgtgggggaactgtcgatgacgacgacgtgcggctgtcatcgacatgtcgtgatggcgcgcgagtttttaataattcctttaaattcaagtaaataaattttggcatggaaaatgcttaaccggtgcatctcatgtaacgggaggatccgggatgacaatttgggaattaagtgaaaaggcggactacatcgccgatcgtcaccgccagcatcaggagcagtggcatacctactgcaactcgctggttcagggcatcaccctgtcgaaagcgcgtctgcatcacgcgatgagctgcgcgccggacaaagagctgtgcttcgtgctgttcggccactttcaggtatatgtcgcactggcggaaggctttaacagccacaccatcgaatactacgtagaaagcaaaaatggcgatgacaaacggctgatcgcccaggcgacgctggatgcggaaggggtgattgacggtcgcatcagtaaccgttcccgcgaagcggtgctggaacactacctggcgatcatcgccaccgtctatgaccgtctgtatgaggccatggagcgcgaccagccggtggatttaagccatctggcgcaggtccattaattatgaagtgtcgacaagtgtcgaaaccgacacctgcgcggcctgatttcgtcaaaagtgactttcacccgaggatgacccggtgaaccgttttgtaattgctgattccagcgtctgtattggctgccgcacctgcgaagccgcctgttccgagacgcatcgccagtatggcctgcaaagtatgccgcgcctgcaggtcatgcgtaatgaaaaagagtctgcgccgcagatgtgccaccactgcgaagacgcgccttgcgccgcggtgtgcccggtcaacgccattactcgcgtcgacggcgcggtacagctgaatgaaagcctgtgcgtgagctgcaaactgtgtggcatcgcctgcccgttcggcgcgattgaattctccggcagccgcccgttggatattcccgccaacgctaacacgccgatggcgcccgccgcgccgccggctccggcccgcgtcagctcgctgctcgattgggtgcctggcgttcgcgctatcgccgtgaaatgcgacctctgccactttgatgagcagggcccggcgtgcgtgcggacctgtccgaccaaagccttagtgctggtggatattcgcgacattgctaagtccagcaagcgtaagcgcgaactgacctttaataccgacctcggcgatttgtcgctgtttcaggcgcaacaagggggcgtgaaatgagcgtggttgcattagtgaatcaggcggttgcctggtataccgccagcgcggtgctggcgtttttatttagtctgcgtaaaccgctgagcggcgcgattgccgggatcggcggcgcggttgccagcgcgatgttaatcgtcgctggcttttcggcgctgatcgcgccggagcggatcaacggcggcatgctgcagtatctgcatctggcgatgcgagtgggcgggattaacgctctgtggctgttggccattggcctgtcggcgctgccgatttcgctgtttaacatttcctggcatcgtcatccgcaggtcaaatccaacggcctgctgattaacctgctgttggctgcagccacctgcgcggtggtggtgactaacttcggcagcctggtggtgatggcggaaatcatggcgctgtgcgccgcgttcctcaccggttgcgcacagtccggcaaactgtggtttgcgctggggcgtctcggtaccctgctgctggcgtggacctgctggctggtgtggtcgttttacggcactctcgatctggcggcgattagccagctggccgccggcgcgccgcagaacatggcgctgtggctgccgggtctgctcggttttgccctgctcgccggggtgatcccgctgcacggctgggcgccgcaggcgcatgcgggcgccagcgccccggccgccgcgctgttttctacggtggtgatgaaggtcggtctgtacggcatcctgaccgtgtcgctggccggtagcgtgccgccgctgtggtggggcgtgctgctgctggtgttggggatgattactgcctttatcggcgggctgtacgcgctgatggaacataacatccagcgcctgctggcttaccacaccctggaaaacatcggcattattctgcttggcctcggcgcgttcgtcaccggtattgctaccggcaacaatgcgctgatggtgctgggctttatcggcggcatgtaccacctgatcaaccacagcctgttcaaaactacgctgttccttggcgcgggggcggtgtggttccgtaccgggcatcgcgatatcgagaaactgggcggtatcggtaaaaaaatgccgctgatttcactcgctatgctggtggggctgatggcgatggccgcgctgccgccgctgaacggctttgccggtgaatgggttatctatcaatctttcttcaagctgagcaccggcgaggtgtttatcggacgtctgctggggccgctgctggcggttggcctggcgattaccggggcgctggcggtgatgtgtatggccaaagtctacggtgtcaccttcctcggcgcgccgcgcagtaaagaggcggaaaacgccacctgcgccccctggctgatgaccttaagcgtggtgctggccgccgcgtgctgcgtcatcggcggcgtggcggcgccgtggctgttgccgctggtcggccacgtcattccggttccggcgcaggccactagcgtcgtgtcgcagccgctgatcgccattctgctgattgcctgtccgctgctgccgttcctgctgatgatcttcttcaaaggcgaccgcctgccggcgcgctcgcgcggtgcggcgtgggtctgcggctacgaccatgaacaagcgatggtggtcaccgcccacggcttcgccatgccggtgaaagaagcctttgcgccgctgctgaagctgcgtcactggttgaatccggtacggctggtgcccggctggcagaacgccgctgcgcccgccttgctgcgcggcgtggcgctgatcgagctggcggtactggtggtgattgtgatttcgcgaggagcctgagagtgaacctattcgttgcattaatacaggcgctggtactgtttgccgtcgcgccgctgctgtccggcctgacccgcgttgcccgcgcgcgcctgcataaccgccgcgggccgggcgtactgcaggagtatcgggatatcctgaaactgctgggtcgccagagcgtgggcccggacgcttccggctgggtattccgcctgacgccgtttgtgatgggtggcgtgatgctgaccatcgccgccgcgctgccggtggtcaccgttgattcaccgctgccgggctgggcgacctgattacgcttatctatctgttcgccatcgcccgtttcttctttgccatttccggcctggataccggcagtccgttcaccgccatcggcagcagtcgtgaagcgatgctcggtgtgctggtcgaaccgatcctgctgcttgggctgtgggtcgcggcgcaggtagccggttccacccatattagcgcgattaccgataccgtttaccactggcccgccgcgcgcagcatcccgctgatcctggcgctgtgcgcctgcgctttcgccacctttatcgaaatgggcaaactgccgttcgatttagccgaggcagaacaggagctgcaggaagggccgctttccgagtacagcggcagcggttttgcggtgctgaagtggggcatcagcctgaaacagctggtggtactgcagatgttcgtcggcgtatttatcccctggggacagatgaccagttttagcgcgccaggcctgctgctagcgctggtggtcgccgtcgtcaagctggtgctcggggtgctgattatcgcgctgttcgaaaacagcatggcgcgtctgcgtttttgtgccacctcccgcgtcacctgggccgggtttggtttcgcctttttagctttcgtctccttgctggtggcgtgattaagagaatttgagcatgtctgaagaaaaaatcggtcaacactatcttgctgcgctgcaccaggccttccctggcgtggtgctggacgaagcctggcagaccaaagatcagcttactgtcaccgtgaaggttaactacctgccggaagtggtcgagttcctgtactacaagcagggcggctggctgtcggtactgttcggcaacgacgaacgtaagttgaacggccactacgcggtttactacgtgctgtcgatggagcagggcactaaatgctggatcaccgtgcgcgtggaagtcgacgctaacaaaccggaatatccgtcggtgaccccgcgcgtgccggcggcggtatggggagagcgcgaagtacgcgatatgtacggtctggtgccggtgggcttgcctgacgagcgccgcctggtgctgccggacgactggccggatgaactctatccgctgcgtaaagacagcatggactaccgccagcgcccggcgccgaccaccgacgcggagacctacgagttcattaacgagctcggtagtaagaaaaacaacgtggtgccgattggcccgctgcacgtcacctccgatgagcctggacacttccgtctgtttgtcgacggcgagaatattatcgacgccgattaccgcctgttctatgtccatcgcggcatggaaaagctggcggaaacccgcatgggctacaacgaagtaacgttcctgtcagaccgggtatgcggcatctgcggcttcgcccacagtaccgcctataccacgtcggtggaaaacgcgatgggcatcgtggtgccggagcgcgcgcagatgatccgcgccattctgctggaagtggaacgcctgcactcgcacctgctgaaccttggcctggcctgccactttaccggctttgactccggttttatgcagttcttccgcgtgcgcgaaacttcaatgaagatggcggagatcctcaccggcgcgcgtaaaacctacggcatgaacctgatcggcgggattcgccgcgatctgctgaaagaggacatgatccagacccgccagctggcgcagcagatgcgtcgtgatgtacaggaactggtggatatgctgctcagcacgccgaacatggaacagcgcaccgtcggtattggccgcctggatccagaaatcgcccgcgacttcagtaacgtcggcccgatggtccgcgccagcggccacgcccgcgatactcgcgccgatcacccgttcgtcggttacggtctgctgccgatggaagttcacagcgagcagggctgcgacgtgatttcccgcctcaaggtgcgtatcaacgaagtttataccgcgctgaatatgattgatttcggtctcgacaatctgcccggcggcccgctgatggtggatggcttcacctatattccgcatcgcttcgcgctgggcttctcggaagcgccgcgcggcgatgatatccactggagcatgaccggcgataaccaaaaactgtaccgctggcgctgccgtgcggcgacctacgccaactggccgaccctgcgctatatgctgcgcggcaacaccgtctccgacgcgccgctgattatcggcagcctcgatccctgctactcctgtaccgaccgcatgacggtggtcgatgtgcgtaagaagaagagcaaagtggtgccgtacaaagagctggagcgctacagcatcgagcgtaaaaactcgccgctgaaataaggaatcgccatgtttacctttatcaaaaaagtcatcaagaccggcaccgcgacccactcctatccgctggagccgatgccggtggataaaaacttccgcggcaaaccggaacacaatccgcagcagtgcatcggctgtgcggcctgcgtgaatgcctgtccgtctaacgccctgacggtagagaccgatctggcgactaaccagctggcgtggcagttcaacctcgggcgctgtattttctgcggccgctgtgaagaagtttgcccaacggcggcgattaagctgtcgcaggagtatgaactggcggtgtggaaaaaagaggatttcctccagcagtcgcgctttgccatctgtcactgtcgggtctgcgcgcggcctttcgcggtacaaaaagagatcgactatgccattgcgctgcttaagcacaacggcgatacccgcgccgaattgcaccgcgaaagttttgagacctgcccggaatgcaaacgccagaaatgcctggtgccgtccgatcgtattgaactgactcgccacatgagggaggccagctgatgagcaatttattaggcccgcgcgatgaaaacggcattccgctgccgatgacggtggaggaatccatcgccagcatgaaggcctcgctgctgaaaaaaatcaaacgttccgcctacgtttaccgcgtcgactgcggcggctgtaacggctgcgaaatcgagattttcgccaccctttcgccgcttttcgatgccgaacgcttcgggattaaagttgtgccgtcgccacgccatgccgatattctgctgtttaccggcgcggtgacccgcgccatgcgttcgccggcgctgcgtgcatggcaatcggcgccggatccgaaaatctgcatctcttacggcgcctgcggcaacagcggcggtatcttccacgatctgtattgcgtatggggcggcaccgacaaaatcgtgccggtcgatgtctatataccgggttgcccgccaacccctgccgccacgctgtacggttttgcgatggcgcttggtctgctggagcaaaaaatccacgcccgtcagccgggcgagcttgacgaccagccaaccgaactgctgcatcccaacatggttcagccgctgcgggtgcgtatcgatcgcgaagcgcgccgtctggccggttatcgctatggccgccagattgccgacgactatatgcgtctgctggggcagggcgataaccaggtactgcgctggctggaggcggagaaagatccgcgccttaccgagatcgttacgcacctgaatcaggtggtcgagggggcgcgtatccgatgagcgagacggtggtgttcagtcagctgagccgtaaatttattgatgagaacgacgcgacgccggatcaggcgcagcaggtggtctattacagcctggcgattggccaccacctcggcgtcattgactgcctggaagcggcgttaagctgcccgtgggaggactatctggcgtggatcggtacgctggaggcgggcagcgccgcgcggcgcaaaatggagggcgtgccgaagtatggcgagatcgttatcgacagcaatcacgtggcgatgctggctaacgcctttgataaagcgcggtccgcgcagactccgcagcagcaggcgtggagtaaaaccctgctcagcatgctgcacgatattcaccaggaaagtgccatctatctgatggtgaggagactacgtgactgacgttttactgtgtgtcggcaacagcatgatgggcgatgacggcgcaggcccgctgctggcggaaatgtgcgcggccaatccggtcggcggctgggtggtgattgacggcggcagcgcgccggaaaacgatatcgtcgccatccgcgagctgcgcccgacccggttgctgatcgtcgacgcgaccgatatggggctcaaccccggcgaaatccgcattgtcgatccggacgatatcgccgacatgtttatgatgaccacccacaacatgccgcttaactatcttatcgatcagttaaaacaggatgttggcgaggtgatttttgtgggcattcagcccgatatagtcggtttctattacccgatgactcagcctgtgaaagacgccgtcgcgacggtatacgcgcggcttgatggctggcaggagcagggcggttttgccgcgctggaagcggccgaggagcaggcgttccccggcttgtgctaatgcttcgccgggctataaatagcacggaccgtaggccgggtaaggcgtaagcctccacccggcaataccggctattccagatccgccccgttgctggcgatgaccttcttataccaccagaacgatttcttgcgcttacgcgcaagcgtgccgttaccggcatcgtcgcgatcgacatacacgaaaccgtagcgcttgctcatctcgccggtggaggcggagaccaaatcgatacagccccaactggtatagccgatgaccggaatgccgtcatctatggcgtcgcgcatcgccttgatatgctcgcgcagatagctaatgcggtagtcgtcgttgatttcgccgttggcgtcaatttcatcgcgcgcgccgagcccgttttccacgaggaatagcggtttctgatagcggtcatacatcatgttcatggtgatgcgcaggccgagaggatcgataccccagccccattcgctggccgcaatgtacggattcttcagcgacttgacgatattggcggcgttggtattgctggtgttcatctccgctgacgcgcagcgcgaggcgtaatagctaaaggagacaaaatcaacggtgtttttgaggatttcgtcgtcgcccggctgtttggcaatagtgacgcctttctcgcggaatacccgcgcggcccacaccggatacgcgccgcgtgcctgcacatcgataaagaacaggttttcacgatctttttccagcgccatccagacatcttccggcttacaggaataggggtagaaattaccgcccgccagcatgcagccgacctggttttgcgggttgacctgatgggcgatttttgtcgccagcgcgctggccaccagctcgtgatgcgcggcctggtatttcacctgttcctgattttctccctcctcaaacaccagaccggcgccggagtaggggctatgcagcataatgttgatttcattgaaggtgagccagtatttcaccagaccgtcaaaagcttcaaaacaggtgcgcgcatagtggctgaaaaaatcgaccatcttccggttacgccaggagccatattccgttaccagatgcatcggtacatcaaagtggcacagggtgaccagcggttcgatcccgtactttctgcactcttcaaacatcgcgcgatagaaggcgataccttccgggtttggctgttgttcatcgccgcgcggaaacaggcggctccaggcgatagaggtgcggaagacgctaaaccccatctccgccatcagggcgatatcctctttatagcgatggtaaaaatcgatcgctacgtggcttggatagaattcttcttcgcgaagcgtaaagcgcttctcctgacccagcttcaccgccaggcgatgggcgccgtgcggaatagtatcaacggtcgtcagccctttgccgccttcaagataagcgccttcagactggttagcggccagagcgccgccccataaaaatccgtgtggaaaactcgacatgcgttacctcgcgttcaaaaaagtgttcaggcgtgagtggccgcgccctggcgctgtctggcatcggcggcggcattttctaccgggatatcttcaaaaccgagcagcagcgtcagcacaaaggagagcaccaccgaaagcgccatcacgccaaagacccaaacgatagtcatcggattggccggatcgaagaactggacgctggtgaacagccccggtgccgccatcgaatggctggccagcccggcgattcccgccaccgcgccacaaataaagccgctgattaagctggcgaccagcgggcgtttcagacgtaccgccacgccgtacagcgccggttcggaaatcccggccagaatcgccgatgccgccgccgccaatgcggtctggcgcagctccgggtttttggttttccacgccaccgccagcgacgatccgcccagcgacaggttggcgccgatttccgatggcatcaccatgccctctttgccggtttcggcaatggtctgaatgatggttggcgtaaagacgcggtgcatcccggtcatcaccagcagcggccagagtccgcccatgatcgccaccgacagccagccgagatagctatgaatcgtgtacaccagcgcggagatcgcgctgccgatccagataccgagcgggccaatcagcaggatcgccagcggcgcggcaatcagcacgatcagcatcggtttaaggaagtttttcgtcaccgccggggtgatgcgatcgacccagcgttcgatataagagagacaccaggtcatcaccagcgccgggatcaccgtgtaggtgtatttcaccgcggtaaccggaatgaaggcgaactcaacgtgttctccctgcgcggctttagccattaattcgatgaatcccggatgcaccagcaccccggcgatagcgatagccagcgacatattggttttgaattttaccgccgcggaagcggcaaccatcagcggcaggaagaagaacgcgccgtcgccgataagcgtcagaatggtcagcgtcggcgagccttttggcaacgcgccgctcatctccaggatcatcgccagcagtttgaccatcgatccgccgataatcgccgggatcagaggcgacatggtgccgataagcgcatcaaggatcccggcgccgatgcgttttaaggtcagcggcggtttcccctgcggctccgccgggcgcaactcgccgggcagcagattcagcacctcgcgatacgcctgcgagacggtattgccgatgatcacctgacactggttatcgctacgcacgacgccaagtaccccttgcagcgctttcagcgccggggcgtccacgcgttggttatctttcaccacgaagcgcaggcgggtcatgcagtgggtcacggcaacgacattatctgcgccgccgagcgccgtcaggatctggttcgccagggctgcataatttttagacatcggattttatcctgttttatcaatagggtactgattacacgccagcgcctgacggcggctatgcgcggtatatgcataggaaaccggttccacaaaatcatgatgagtttcattgagtcatacaagaattaaaaaaatcactttgcaaatttgtgattttgatcgctttgtaggcaacgactggaaagcatcccggtgatgtcggctgctgaaaaacagcgagacgtgcagtacactgcaggcaacttaagttacaggaagaaccccatggcaacgatgctggaggttgcgaagcgcgcgggagtatcaaaggcgaccgtgtcgcgagtgctgtcgggcaacggctatgtcagccaggaaaccaaagaccgggtgtttcaggcaattgccgaaagcggctatcggccgaatctgctggcgcgcaatctggcgaccaaaaaaagccagactatcggactggtggtaaccaacaccctttatcacggcgtttatttcagcgagctgctgtttcacgtggcgcggctgacggaagatcaggggcggcagttgatccttgccgacggcaaacacagcgcgcaagaggagcgcgaggcgattcagtatctgctcgatatgcgctgtgatgcgatcatcctctatccgcgctttcttagcgtcgatgagatggatgagataatcgacaatcatgagcagccgatcgtggtgctgaaccgtcgcctgcgccgccacgccagccactgcgtatggtccgatcacaaagcctcggcgcggatggcggttgaaaagttaattgccagcggtcatcgcgacattgcgtttatcaccggttcgctggattcgcctaccggggttgagcgtctctctggttataaagacgcgctggcaggcctggggcttcccgtgcggcaagaattgatcgtcgaagggcgctggacgccgcacaccggcgccgccgctgtcgaagcgctcagccaacgcggcgtcagtttcagcgcgctggtcgccagtaatgatgacatggcgatcggcgcgattaagcaactgcaccagcaggggattgcagtaccgcagcaggtatcggtgatcggtttcgatgacatcgcgctggcgccgtatgtgatcccctcgctctccagcgttaaaattccggtcaccgaaatgatgaaagagagcatcaacaggctgatctttatgctcgacggcggcgaatttaaatatcagcaaactttccccggcgagctgattgaacgcgagtcgttggcacgcggcccgcatgcctgatgtcgtcatctgtcatcgtcagttgtgacgatgacagcggtagttaatttaattctcttaaatttcaatggaataaaagttggaacgtattatgcataatccggcacgttaacttctttccgctggagaaatggatgaaccgtttcattatcgccgatgcgagcaaatgcatcggctgccgcacctgtgaagtggcctgcgtggtctctcatcaggaaaatcaggattgcgccgcgctgacgccgcagtcgttcttgccgcgtattcacgtgatcaaaggcgtcaatgtgtcgacggcgacggcctgtcgtcaatgtgaagacgcgccatgcgccaacgtctgcccgaacggcgccatcagccgcgataaaggctttgtccacgtgatgcaggagcgctgcatcggctgtaaaacctgcgttgttgcctgcccgtatggggcgatggaagtggtggtgcgcccggtcgttcgccacagcggcgccgggttgaatgtcatggcggaaaaagccgaagccaacaagtgcgacctgtgccaccagcgcgatagcggtccggcctgcattgaagcctgcccgacgcacgcgctggtttgcgtcgaccgcaacaagcttgagcagatgaacctcgaaaaacgtcgccgtacggcgctggcctggtaatacaccgcatgaacggggtgcaaatccgcattcgcggcaaagtgcaggggtgggtttccgccccttcgtctggcaactggcgcggcaaatggcgcgcggcggcgatgtctgtaacgacggcgacggcgtgctggtcaggctggccggcgacgacgatggctttactgccgcattggcccgtcactgcccgccgctggcgcgtattgacagcaccgactgcaccccgtttcactggcacaggcttcctcagggtttcaccattcgccacagcggcggcggcagtatgcgcacgcagattgttcccgatgccgcaacctgcccggcgtgcctggcggagatgaacgatccgcaagaacgccgctaccgctacccctttatcaactgtacccactgcgggccgcgcttcaccatcattcgcgccatgccatacgatcgcccctttaccgcgatggcgccgttcccgctgtgtccgcgctgcgctgccgagtaccgggagcctgccgatcgccgttttcacgcccagccggtggcctgtgccgattgcggcccgcagctggagtggcgggcgggaacgctaacgctattcgctgaagcggcgctgcaggcggccatcgcgcggctggcggcgggcgatattgtggcgataaaagggattggcggttttcatctggcctgcgatgccggtaatagcgtggcggtggcagcgctgcgcgggcgtaaacggcgcccggcaaaaccgctggcggtaatgctgccgacggcaacggggttacccgctgcggcggcaacgctgctgcgctcgcccgccgcgccgattgtattgctggataaagcgcaggttcccggactgtgtgacgagattgcgccagggcttgcggaagttggggtgatgctgccgtctaatccgctgcagcatttacttctgcaggcgctggcgcgcccgattgtgatgacctccggcaacctcagcggccgccctccggcgttgagtaatcgcgaagcgctcaccgacttagccgctatcgccgacggttttctgctacataatcgcgatatcgtgcagcgtatggacgattcgctggtgcgctcaagcggtgagatgctgcgccgcgcccgtggctatgtgccggatgcgctgccgctgccgccgggcctggataatattccgccgttgctggcgctgggggcggatatgaaaaataccttctgtctggcgcgcggcggcgaagcggtgctgagccagcattttggcgatctcggcgaggagggcgtcgagcaacagtggcgcagagcgctgcagttaatgcagagcatttatgcatttgcgccgcagcgggtggcggttgacgcccatcccggctatcgctcgacacagtgggcggcgtcaatgtcgttaccggtcgagccggtactgcatcaccatgcccacgcggcggcttgcctggcggaacaccgctggccgctcgacggcggcgatgtgattgccctgaccctcgatggcattggcatggggaaaacggcgcgctgtggggcggcgaatgcctgcggatgaactaccgcgaatgcgaacatcttggcggcctcccggccgtcgcgctgccgggcggcgatctcgcggcgcgccagccgtggcgaaatttgttggcccagtgcctggcatttattcccgactggcagtcatacccgcaaaccgccgcgctggggcagcgaaactggccgctgttggcgcaggccatcgaacgcggcattaattcgccgcgcgcctcttcctgcggacggctgtttgatgccgtcgcctgcgcgctggattgcgcgccggaaaccctgagctacgaaggcgaggctgcctgtcggctggaggcgctggcagccagctgtccgggcgtcagccatccggtcacgctgccctgtcgtggcggcgaactggatttagccaccttctggcaacagtggttgcgctggcaggcgacgcccgagcagaaagcctgggcctttcatgatgcgctggcctgcgggctggcggcgctggcgcgcgaccgcgccgcttcccgcgggatcgagacgatcgtttgtagcggcggcgtgttgcataatcagctgctcgccgcccggctcagcggttacctctctgactttactttgcttttgccgcagcagcttcctgctggcgatggcgcgatcgcctacggtcaggcggtggtggccgctgcccgctggcagtctcaaaggatttaagatgataacgatgattttacgccaacagccgcgtgcggcggtgctggtactgggacttatcgccgcgaacgccctggcctggctatgggcgtttcaggcgtttggcgacagcggggcattgatggccgccagtctgctggcctggggttacggcctgcgccatgcggtcgacgccgaccatattgcggcgattgataacgtcacccgcaacatgatgcagcaggggcggcggccgtttggcgtcggggcatggttctcgctagggcattcgtcgatcgtggtgctggcgtcggcggcgatcgccgcgacggccaccgccttcagccagcagatgagctggctacacgaaaccggcagcgtgattggcactgcggtatcggcgctgtttctgctggcaatggcgctggtcaatctggtgattttgcgcagcgtgtggcgcagcttccaggcgtggaagcgcggtgaaaaggtcagcgacgaaatcgtcagcggcggcggcatgatgagctggctgtttggcaaaaccttccggctgataagccgcagctggcagatgtatctggtgggctttttgtttggtctcggctttgataccgccaccgaaatcggcgtgctgggtatttccgccgccggcgcgtcgagcggtatttcgatttggtcgataatggtcttcccggcgctgttcgccagcggtatggcgctggtggatacgcttgataatgtgttgatggtcggcgcctacggttgggcattcagcaagccgcagcgcaagctctattacaatatgaccattaccggcacctcggtggtggtggcgctgtttatcggcggcctggaagcgctggggctgttaatggataagttcgccctaagcggcggggtgtggcgctgggtaggagcgttaaacgataacctcggcgatgccgggtttgtggtggtggggctgttcgtcgtttgttgggcgctgtcggtgcttaattatcgctggcgcggctacgataatctggcgcgctagccgggatattttcccggcttgcgctgcgcttagccgagctaccaagagtgccccggccttccggtaacgtctcagcgattttgaggccaccaacagcggcagtttcagccagcatggtgaataaattaaaggcaggccgcacggaccgtaggccgggtaagcgtagcgccacccggcaaaacagggtcgcctggacggtaatcacctcaccagttgtttgagcagcgcaaaggcttccttcatcttatcttcgctcaccacaaaggcccgcagcaggttttcggcatcaacgcctttcgccaccagcccctctttggcggccacgatattccacgtcagatcgtcgcggcgggtgtcaccggccagatgcagcggcagatccggcgttttcactttcaccagcattggcggcaatgtgagctcgcccgcttgcgccagcaggtttttactcaggcacatagcgctgagtaaaatcggctgcaggaacggcagtaccgtaccgttgatttccgcacagtcgccgagcgcataaatcgccgggtcgctggtttgcagttggctattgaccaccacgccgcggttaatctgcaatccggcatggcgcgccagcgacgtttccgggcgcaggccggcggcggcaacgaccgcatcgacggttatcgcgcgctggcggtcgagactgacgcgaataccgtcggcggtttgctccagcccctcaagttgcgccttaagcatcagatgaacgcccatctcggtaagccgatgctgcaggcggctgctggcttccggcggcatcagcgccgccagcacgctggctgaattgtcgactaccgttaccgctttaccggcgcggcagaaatccatcgccagttcgcagccaatcaggccgccgccgacgatcagcacgcgcgtcgcgtcgtgcagctggctctgcgccgcgccatattcgcgctggctattgagggtcagcatcagctcgcgccccggcaccggagggataaacggtgtcgcgccggtggccagcaccagtttgtcgtagcgccactggttatcctggctcttcactaaccggttttcggcgtcgatatcgcttacccaggtatggggaaacagacgcagattgtactgctcggcgaactcgccggcgctttgcagggtcagatcgtcggccttctgcccgcgactgatgacatggctgagatccggtttgttgtattcatccatgctatcggcggcgattaacgtcagcggaatttgcgtatcctgcttgcgaatatttttcaccaactggcgggccgcgaagcccgagccgatgatgacgatgccatcactcattttgcctccgtcgccagtacgtcaaagacatctttgccaagagaacactcagggcagaggaaattgtccggcacttcactccacggcgtccctggctgtacatcctggttaggttcgcctttcgccgggtcatagacccactggcacacgctgcactgcatcatgggaccgagatcggcggccgcggcggcggcacaggcacagtcctgttgttccgacgatgtcgcagcttcagcaaccggcagcggcgagagggcccactggcgggcaatgtcgcgtccgtgttggcggcacagttccagcgcgtcgatatccgggcgccatttggctttcaggctcagcgacatctcaaagccggcatcctgcaggcgggtggacagacggtctaccgcgccgccgctccagccgtgcgagccaaaggcgctggcgcgtttattgcgaaaacgcagcccggtcatctcttccaccagcccggcgattttcggcatcatcacgttgttcatggtggaggtgcccaccagcacgcctttcgagcggaaaacgttggtgagaatgtcgtttttgtcgctgcgggcgacgttgaagatttttaccgccacccgtggatcaacctcggtaatcccctgagcgatggcgtccgccatcatgcgggtgttattggacatggtgtcgtagaagagggtgatgcgatcttcctggtaatccgccgcccactcgaggtatttctcgacgatttgcgtcggattatcgcgccagaccacgccgtgggaggtggcaatcatatccaccggcaggttgaagccaaggatttcggtaattttcggtgtcaccaggcggctgaagggcgtcaggatgttggcgtagtagcgctggcactgttcgtacagttcaatctggtccacttcatcgttgaacaggtgttcgtcgcagtagtgctggccgaaggcgtcgttgctgaacagcaccgcgtcgccggtcaggtaggtcatcatgctgtcaggccagtgcagcatcggcgtttccacgaagatcagctgtttaccattaccgatatcgagagtatcgccggttttcaccacgtggaagttccactcaggatgatgatggtggccgttgatcgagtcgatggcgttggcggtgcagtaaatcggcgtatccgggatctgcatcatcagttcggtcagcgcgccggcatggtcctcttcggcgtggttaatcacgatatagtcgaggtcagccagatcgatttcgctgcgcaggttctgcacgaactcgcggctgaatttatgatcgacggtatcaatcagcacgtttttctcttcgcggatgagatagctgttgtagctgctgccgcgcagcgttttatattcggtgccgtggaaatcacggacttcccaatcgcgttggccaacccaaagaatgttatttttaaccgcaatagacatagcaacctcaatcaatacagtgtgttcaaattaagttgattggcttatttcaagttgcgtgccaactttttaattaattgataattatctgttttttattttttatgatttcggttgctgtcaaaatgacaatgactaaaatagtcgatatgacaatgtgtattgtcaaaatgacaatggagcggtaatgagtttttccgtcgacgagctggcgagaatcgctattgatttacaaagcgatattggtcacaccgaccgtttttcgcgcctgattactaccctacggcagattcttggctgcgatgcctcggcgctgctgcgctatgaggcgcatcagtttgtgccgctggcgatcgatggcctggcgcaggatgtgctcggtcggcgctttgccctggaaggacacccgcggcttgaggcgattgcgcgcgccggggatgtggtgcgcttcccggcggatagcgacttgcccgacccctatgacgggctgattcccggtcatgagagcctgaaggttcacgcctgcgttggcctgccgctgtttgccggacagacgctgattggcgcgctgacccttgatggtatggatgccgatcgtttcgatagtttcagcgatgaagagctgcggctaattgccgcgctggtggccggggcattgaataacgcgctgctcatcgcccgtcttgaggcgcaaaacgtgctgccggtgcagccggtgaatgacgcgcagcctgagcgtcaggagattatcggcctgtcggcacccatgctgcagctgaaaaaagagatcgatatcgtcgccgcctcggatttaaacgtgctgataagcggcgaaaccggcaccggtaaagagctggtggcgaaggcggtgcaccagggatcgccgcgagccgccaatccgctggtctatctcaactgcgcggcgctgccggaaagcgtggcggagagcgagttgttcggccatgtgaaaggggcgtttaccggggctatcagcaaccgcagcggtaaatttgagatggctgatagcggcaccctgtttcttgacgaaatcggcgaactgtcgctggcgttgcaggcgaagctgctgcgcgtgttgcagtatggcgatattcagcgcgtcggcgatgaccgcagcctgcgggtcgatgtgcgggtgctggcggcgacgaaccgcgatctgcgccaggaggtggtggaagggcgctttcgcgccgatctgtaccatcggctgagcgtcttcccgctgtcggttccggcgctacgcgagcgggaaaacgatgtggtgttgctggcgggctatttctgtgagcagtgccgcctgcggatggggctggcgcgggtcattttggctgaggcggcgcgaaacaggctgcagcagtggtcctggccgggcaacgtgcgcgaactggagcatgctattcaccgggcggtggtgctggcgcgggccacccaggccggtgatgaagtggtactggagccgccgcatttccagtttgcggtggcggcgccgatgttgccgactgagacggcggcagcggcgcccgcgacgggaagcgtcaatctgcgcgaggcgaccgaatcttttcagcgagaagcaattagccgcgcgctggaggcgaaccagcgcaactgggcggcgaccgcccgtgcgctggaactggacgtcgccaacctgcatcggctggcgaaacgtctggggcttaaaggatccctgcctggtaaaagttctgtaggttgatggcaccgaccagttggccgttttcatctactaccggcgcggcgctgattttgtgtttcatcaaccgctctttggcttccaccgcgcggctttccgcctgcaacgtcacgccgttgcgggtcatcgcctgagtgacgccatcgttgagcgtaccgccagcaaccagccaacggcgcaggtcgccgtcggtgaaaacgccctgcacgcggttagcttcatcgcagaccgccaccaggccgagcccggttcggcttagttcaagcatggcgtccatgacgttggcgtcagcattgactcgcggtacttcttcgtcgcggcgcatcaggtgatgtactttgttcagcagacgcgcgccgagggcgcccgccgggtgggaacgggcgaaatcttcttcattgaaaccgcgcgcctgcatcaccgccatcgccagcgcgtcgcccagcatcagcgtgttgacggtgctggaggtcggcgccagatgcatcgggcaggcttcgcgctccacggcgatatccagcaccgctttcgcagccagcgccagcggcgaggtggatttgccggtcatcgccagcagcggaatggatttctcttccagccgcggcacgatgagatccagctctttcgcgctaccggagtaggagataaacagcatcacgtcgcggctatcgagcatgccgagatcgccatgcagggcttccgccggatggacgaaaaaggccggggtgccggtgctggcgaaggttgccgccagctttttaccgatgtggccggatttaccgataccggagacaatcagtttgccctcgcagtggatgatggtttccgccgcgcggatgaagtcgtcgcccaggcgttccggcaggcggctcgcctcctgcagctcaagcatcagggtctggcgtccggcctctaacaaaaagttactcatgatgttctccagtaataatgacttcaataccttgtgcttccagcgcccgctggaattcagggtcaatatcggcatcggtaatcaatttatccacgcgttcaaggccgcagacaatgttgggacttttacggccaaacttggatgagtcggccatcaggatcacttcgcgggcggcgttacacatcgccttacttacggtatacacctcattaaaggtggtgacacccgcaaccagatcaatgccatcggtgcccataaacagcttgtcgaagctgaattgttcgaaggcgttttccgccagttggccgtgaaaggaggccgattttttacggaaggtgccgcccggcatcaggatggtctgctcgttatccagctcggaaagcgcgttgacgatatgcaggctgttggtcatcaccgtgatgttattgaagcggctcagcaatggcaccatctgcagcacggtgctgccggcgtcgaggataattgaatcgccatcgtggatgtatcgcacggcggcctcggcaatctgcgctttcttatgggtgttgatcagcgtcttgtggtcgataggcgggtcggcctcgtctttatttaacactacgccgccgtaggtgcggatgacggtcccggcattctccagaatcaccagatccttgcggatagtggtgccggtggtgtcgaagtgttgcgccagctcttcgaccgagcatttgccctgcgattgcaggtactcgagaatggctgcctggcgctgacgtggtttcataggcgttgtatcctgcgtttaagtttcgaagtgataatttcgcaagatattaactttcacaacgaaattatgcatgtttcggattaagcgctaatgatagtgcattctgacagagcggatcattgggaaagatcacatcaggctgcaattcctcgagatgtttaccggtaagcgtggggattttttgcggactggcgaagacggtgagtcccttcatcaacagcgtatcgcaaatacgatcgttttcatcgacggcgatagcaacaatcgcgcgtggtttaaagcgcccggaggaacggccgacgccgacgcggccctgcaggcaaaggctatcaaaggcgcgattgaagcggtggatctgccagccgccgaaagccagttggcaaagccaggcaatagcggcgacggtaatgagtgcggtaaccataatgtctcctgaaggtgtaatgccgggtacaacccgggtaccgttttttgtcgggtggcggctgacgccttacccgacctacagttttgtaacccggataagcgcagcgccatccgggaaccttttaaaacatcacctggccgccggtgacgttaatcgactgcccggtgcagtacgatgcctgcgggctggcgtaaaacatcaacacgttcagcacatcctggtaatcgcagccgcgtttcaacggcaccttatcgatgtagtactgctcgacttcgctctcatcaatgccgagcttggtggcgtactgcggcagcagcgactggaacatcggggatttcaacagattgccgagcatcagcgaatgcacggtaataccgtattctgccagatccagcgccagcgactgggtaagcccgacgccgccgaacttcgccgcgctatagcctgagttatgcttactgccgactttgccggatttcgagttgatctgaatgatgcgacctttaatgccatcgcggatcatcagccgtgagaactcgcgggcgcagaggaaatagcccaccaggttgacctgcagcgagcggtcaaaatcgcccagcgcgaagtcgctaataaacgcggccttagcgataccggcactgtagaccaggagatcgacgcgcgtgaaaatctcatctacgccgtgggccagcgccgtgacgctggcttcgctggtggcgtcggcgccgaagccgtatgccataccttcgccatattcagcgttgatctcctgggcgacgcggctggctttttcactttggatatcgaccaccgccacgcggtagccctcggcggccagaccgcggcacagaaactctcctaaggtttgtccgccaccaatgacaacagcaacctgattcatctttctctccttctaagcaacaaatttcagtacacagccggtcgcgatggcgtccggtaccgggcccgcaacgtgaacggttccgggaaactccgcctgacgatggccgtcaaagcgcagggtgatgtggcccagctcgcgcaggttttgctcggcgacctcgccgacggcggtcaccggataacgccgatcgccgagctgtagctctgcgcccgctaccaaagggccggcaagctcgccgtggttgtgaataaagcaatactcttcgatatccgccggtgcgccctcgcggaaggtaataagcatctgttcttccagcgccgtcgctgcgcaggcgccgatacgggtaatggtggtgtggtaaatgacggtcatcttcaggaacctcttattggtaaataaatccggaaacgaaccacgcgatcagcacggttggcgcgccggtgaggaagcggctgaccagcactgacggcacgccgacgcgtacggtatcctgacgggcttcggccagcgacaggcctaccgggataaaatcgcaggcggcctgggcattaatggcaaacagcgcgggcagggcgagatgcggtggaatgttgcccagaccgatctggacgccaatcagcacgccgatcacctgggctatcaccgcaccggggccgagaaacggcgataacagcgggaaggaacagatcagcgccagcgtcaccagccccagcggatggctggcgagcggcgccaggccgtgggcaatccagtcgccgataccggaggccatgatgatgccgatcagcgccgagacgaaggccataaaaggcagaatggttttcagcaccgtatcaatggtgtcgcgcccggcctggaacagtaccgccaccaccgatcccatccccatcccgaccttagccagcaggccgtcgctctgttcggtaatcttcttgctggcgtcgtaatcgcggcccgcggcggggagtggttgtgctgccgtctcgccgctatcttccagcagtttgatgttctcttcttttactccggagacgtaaatatcttcgacgatgtactgcgccagcggcccggatttaccggtggcgtggatgttgatggtcggaatacggcgcttcggatagaggccgcagcgcagggtgccgccgcagtcaataatggcgatgccaatttcgctttccgccggttcaccctctttaaatccatcaaccgcctgccagccggtcaggctggcgagcgtatcgacgatcgccgggcgggtgcctgcggtgatatagataatctttttgccctcaacgacgtcgagctcaagcgggccgccccaaccgccggttcctttttcaatacgaatacgggtcatgatgtcgctcctgacagacgcactttctggtcaagttgaatcgccatttttctctcgaaaatagaggtggtcaggtcggtgacccagccgcggaagaagttggttaccaggccaaccagcaggtagctcaccgccagcgggccaagcggcaggcccagcgtggtgaggccgttggcgataccgagataaacaaacagctcgccggggttgatgtgcggaaacagcccgttcatcgaatgacagctataggaggccgccgcgtaatagctcggtttgtatttctccggcataaagcggccaaggcttaaggtcatggggttgcagaagacaaaggtgccgatgcagggcagcagcaggtaacgggtaagcgggttgccggcgcagcgctgcgccagcttttcgatccgctgctggccgataaagttgatcagcgcgttcatgatcaccagcaggcttatcagcagcggcaggatcccggtcaccataccggtaaacacctcgccgcctttctgaaacaggccgatgaaccactcagcgccgtgggtaacgatttcaatcattgttctctccttcagcgtgttatttttcttgctaactggaggctgattttaatcactttgaaaggtttaaaagtgttaaattgatcgcaaaatgaaagataaatattttattttgaaagtttgtgcgcgatgaatgataaaattaacgtgcggatcgaactcggagaacgtgcaaaaaaaggactattttgtctgcaaatgtattgccgcttccttgttggcgggcgcatgctttaccataattaccctttgccgattttgttaaatggaattcccatgttgaagcgtcgctatctggctttactccctttatgtgcacttctcgctgcctgcagcagcaaacctaagacccccgcggaagcggagatggcgagcggaaccggcggctttctgctggaaccgcagcataacgtgatgcagatgggcggcgatttcgccaataacccagcggcggcgcagttcatcgataagatggtggcgaagcacggcttcgatagacagcagctccaggagatcctgtcgcaggctaagcgcctggactacgtgctgcggctaatggatcgccaggcgccgagcgggctgccgccgaccgggccaaacggcgcctggttacgctataagaaacagtttattacgccggataacgtgcagaacggcgtggtgttctggaaccagtatcaggacgcgctgaaccgcgcgtatcaggtctacggcgtaccgccggaaatcatcgtcggcattatcggcgtggaaacccgttggggccgggtgatgggcaaaacccgcatcctcgatgcgctggcgacgctgtcgtttaactatccgcgccgcgctgaatacttctcctctgagctggaaaccttcctgctgatggcgcgcagcgaaagcgatgacccgctggatctgaaaggctcctttgccggcgcgatgggctacggccagtttatgccgtcgtcgtataagcaatacgcggtggacttcaacggcgacggtcatatcaacctgtgggatccggttgatgccatcggtagcgtggcgaactactttaaacagcacggttgggtgagcggcgataccgtcgcggtgcaggcgctgggccaggcaccgggtctggataacggctttaaaaccaaatacagcgtttcacagctgtcggcggcgggattaaccccaacgcagccgcttggcaaccatcagcaggccagtctgctgcggctggatatcggcaccgggtaccagtactggtatggtctgccgaacttctacactatcacccgatataaccacagcacccactacgcgatggctgtctggcagctggggctggcggtttcgcaggcccgcggcggttattgatcctttcatccagccgacatatttcgagttccccggatggcggcgcgaagcgccttatccgggctacggtctggtatccggttggtagccccggtaagcgcagcgcgaccggggacatcgccccgggacgccgcgcttatccatccgttttttccctctgcatgccttttgttgacctttgttacatttcctcttgctgacgcagatttacattcttttccaaatcccatattgttatgttataacattttattggggcgggaatatgttcacatcggtttttatggcatccggcgcggcgcgcgtggcaatcgcctgcggactgctggcggcgctatggctggccacatggtgggcggtggcgctgccatgattgagctggatcatctggttgccgggtatgaaggcatggcaatcactccggcgatgagcggcgtgattgcggcgggaagcctgacggcgattgtcgggcttaatggctgcggtaaatcgacgctgctgaaaacgctggctggatttattccaccggttagcggccggctgaactggcgcaaagggcggccagtgatcggctggctggcgcagcgccatgccctggaatcacagtttccgctgctggtgcgcgatgtcgtcagccagggggcctggccgcgggtctcgctgctgcgcggtctgggcggcggcgagcgtcagcgcatcaaggcggcgctcgagcgggtggggctcagcgcgctggccaatacgccgattgaagagctctcgggcggccagtttcagcgcatgctctttgccagggtgatggtgcaacaggcgccgctggtgatgttggacgagccgtttaccggcgtcgatgaggccaccagccgcgagctgatggcgcttatcatcgatatgcatcgccaggggcaaacgatactggcggtactgcacgataaccagtgcgtggccgatttctttcctgagacgctgctacttgaaccccagcacgcgcgctggggcgagacgtcaagcgtgcttcccgccttcaacaccgcgaggcaggcatgatctggcataccttttttcaaccttttattgaatttggctttatgcgccgggcgctggtggtgtgcttcgcgctgtcgctgagcaccaccatgttaggcgtgctattgctgctgcgacggatgagcctgatgggcgatgcgctgtcgcacgccattctaccgggggttgcggcgggttatctccttaacggcatgtcgctgctggcgatgagcgttggcggatttatcgctgggatcgcggtggcgctggtggcgggctgggtcagccggcgaacgccgctgaaagaggacgccagttttgccggtttttacctcggctcgctggcgcttggcgtcacgctggtctcgctgcgcggctccagcgtcgatctgctgcacctgctgttcggttcgattctggcggtggatagcgacgcggcgttctttgtcaccggcgtggcgagcctgacgctgctgtgcattgcgctgttttatcgcgggctggtcagcgaggcgttcgatagcgcctggttacaggtcaacgcgcggcggctaccggcgctgttgcacggcctgtttctcgcgctattggtactgaacctggtggcggggtttcaggtgctcggcacgttaatggcggtagggctgatgatgttgcccgcggtagcggcgcgctgttgggcacgaacgctgccgggcattttgttgctggcggcggcgatcggcgcgttttgcgcgtggatgggattgagcctttcgtgggcagtgaatttacccgccgggcccgcgatcgtgctgaccgccagcgtactgttttttatttcggtgttttttggcacgcgcagccggctgatcattggctggcgcaaattaatggggtaaggaaatgatgaaacgaagtgcagtggtgatggcgttagccgtggggctgatggcgcagggggcgatagcaaaaacgctgaacgtggtaagcagcttttcggtgctgggcgatatggcgcagcaggtcggcggcgagcatgttcatgtcgatacgctggtagggccggatggcgatccgcacacctttgaaccttcaccgaaggatagcgcgctgctcagcaaagccgacgtggtggtggttaacgggcttggcctggaaggatggctggatcggctggtgaaagcgtccggttttaagggagaattagtggtggcgtcaaaaggggttaagacgcataccctcgatgaagacggtaaaacggtgaccgatccgcacgcctggaatagcgccgctaatggcgcgttgtacgcgcagaatatccttgatggcctggtgaaagccgacccgcaggataaagcggcgctccagagcagcggtaagcgttatatcgagcagctgacggcaattgacggctgggcgaaggcgcagtttagcgccatcccgcaggcgaagcgtaaagtgctgaccagccatgatgctttcggctattttggccgcgcttacaacgtgacgttccttgcgccgcaggggctctcatccgagagcgaagccagcgcggcgcaggtagcggcgttgattaagcaaatcaaagccgatggcgtgcatacctggtttatggagaaccagcttgacccgcgtctggtgcagcaaatcgctggcgcaacgggggcgcaaccgggcggcgaactctatccggaagcgctgtctaagccgggcggcgtagccgatagctacgttaaaatgctgcgccataacgtcgagctcatcgccaatagtatgaagtaacaggttgtctggccgtcccggttgcagcgggacggcccatttttggatccccccttgtaaaatcaccatctcgtccccatatctctgccgaaagtgctatctttgatggcctctttatctggcttaagcggggcaaaaatgaccgattcagaattaatgcagctaagcgaacaggttgggctggcgctgaaagcgcagggcgcgacgctgaccaccgcagagtcctgcaccggcggctggatagccaaagcgctgaccgatattgccggtagctcagcgtggtttgagcgcggtttcgtgacctatagcaacgaagccaaatcgcagatgattggcgtgagcgaagtgacgttactggataacggcgcagtgagcgaaccggtggtggtggagatggcgattggcgcgctacgcgcggcgcgcgccacctatgcggtatcggtcagcggtatcgccggcccggacggcggcagcgcggagaagcccgtcggcaccgtgtggttcggcgtcgcctgtgcgaacgggcagggcgtgactcgccgcgaatgctttgccggagaccgcgaatcagtgcgtcgtcaggcgacggcctatgcgttaaatctgctctggcaacaatttctacaaaatacttgatactgtatgaccatacagtataattgcctcagctgaacaaatattaacggcgaagcgaacgcgcttcacctcgcatgacaggagtaacaatggcgatcgacgaaaacaaacagaaagcgttggcggcagcactgggccagatcgaaaagcaattcggtaaaggctccatcatgcgcctgggtgaagaccgttccatggacgtggaaaccatctccaccggttcgctttctctggatatcgcgctcggtgcaggcggtctgccaatgggccgtatcgttgagatctacgggccggaatcatcgggtaaaactaccctgacgctgcaggttatcgccgcagcgcagcgtgaaggcaaaacctgtgcgttcatcgatgccgaacacgcgctggatccggtatatgcccgcaagctgggcgttgatatcgacaacctgctgtgctctcagccggataccggcgaacaggcgctggaaatctgtgacgcgctggcgcgttccggcgcggtagacgttatcgtcgtcgactccgtggcagcgctgacgccgaaggcagaaatcgaaggcgaaatcggcgactctcacatgggcctcgcggcgcgtatgatgagccaggcgatgcgtaaactggctggtaacctgaagcaatccaacacgctgctgatcttcatcaaccagatccgtatgaaaatcggcgtgatgttcggtaacccggaaaccaccaccggtggtaacgcgctgaagttctatgcctccgtgcgtctggacattcgccgcatcggcgcggtgaaagagggcgacaacgtcgtcggcagcgaaacccgcgttaaagtggtgaaaaacaaaattgcagcgccgttcaaacaggctgaattccagatcctctacggtgaaggcatcaacttcttcggcgagttggttgacctcggcgtgaaagagaagctgattgaaaaagcgggtgcctggtatagctacaatggcgacaaaatcggccagggtaaagcgaacgctatctcctggctgaaagataacccggcggcggcgaaagaaattgagaagaaagttcgcgaactgctgcttaacaaccaggactccacgccggacttcgcggttgacggcaacgacgcagaagaaaccgaacaagatttctgatatcgtctaaaagagtgacaaagggctgctgatgcggcccttttgcttttcttagattatcgaggtgcctgtgactgagacttcatcacgccgctccggctatgcgcgtctgttggatcgcgcaattcgtattctggcgatgcgcgatcatagcgaacaggagctgcggcgtaagctggcggcgccggtaatgagtaaaaacggccctgaaaagctggacattacgccggaagaacttgaacaggttgtcggctggtgcgtggaaaaccgctatcttgatgaccagcgttttgttcgtcagtttattgccagccggagccgcaagggctatgggccggcacgtatccgccaggagttgaatcaaaagggcattggccgcagcgacatcgaaagcgcgatgcgcgagtgtgaaatcgactgggcggcgctggcgaaagagcaggcgcagcgtaaatacggcgaaccgttacctaccgcctttactgaaaaagttaaaatccagcgatttttgctgtaccgcggctatctgatggaagatatccaggaaatctggcgaaattttgcagattgacccatcggggattttacttccctctaaagaaaacttatcttattcccactttattccgtcgggccgctgcttgtgattgcataatcagcgtccagggcgattattccttatacacaaaatcattcaagctgcatcacggcggcaagagagaacagcttctgggcgtacgtgagttcactaccgggagaggacgttccgccaggtcagaggcgacttgaaggatgaagtgtagcttgatttcaggataattatgagcaagagcaccgctgagatccgtcaggcgtttctcgactttttccatagtaagggacatcaggtagttgccagcagctccctggtgccgcacaacgatccgaccctgctgtttaccaacgccgggatgaaccagttcaaggatgtcttccttggtctcgacaaacgtaattattcgcgcgcgaccaccgcgcagcgttgcgtgcgtgcgggcggtaaacacaacgatctggaaaacgtcggttacaccgcacgtcaccacaccttcttcgaaatgctgggcaacttcagcttcggcgattacttcaagcaggatgccatcaaatacgcatgggaactgctgaccggtgagaactggttcgccctgccgaaagaaaaactgtgggttaccgtttacgagaccgatgacgaagctttcgacatctgggccaatgaagtgggcgttccgcgcgagcgtattatccgcatcggcgacaacaaaggtgcgccgtttgcttctgataacttctggcagatgggcgataccggtccgtgcggcccatgcaccgaaatcttctttgaccatggcgaccacatctggggcggccctccgggaagcccggaagaagatggcgaccgttacattgagatctggaacatcgtcttcatgcagttcaaccgtcaggctgacggtaccatggagccgctgccgaagccttccgttgataccggcatggggctggagcgtattgccgctgttctgcagcacgttaactccaactatgacatcgacctgttccgcaacctgattgcgagcgtggcgaaagtcaccggcgcgaccgatctcactaacaagtcgctgcgcgttattgccgaccacattcgttcctgcgcattcctgattgctgatggcgtgatcccgtcgaatgaaaaccgcggctacgtgctgcgtcgcatcattcgccgcgcgattcgccacggcaacatgctgggcgcgaaggacaccttcttctggaaactggttgccccgctgatcgacgtgatgggcgctgccggtgaagagctgaaacagcagcaggctctggttgagcaggtgctgaaaaccgaagaagagcagtttgcgcgcacactggagcgcggactggcgctgctggatgaggaactgtcgaagcttaaaggcgacacgctggacggcgaaaccgccttccgtctgtatgacacctatggcttcccggtcgacctgactgcggatgtctgccgcgagcgcaacatcaaggttgacgaagcaggctttgaagccgcgatggaagagcagcgccgccgcgcgcgtgagtccagcggtttcggcgctgactataacgcgatgattcgcgttgacggcgcatcggaatttaaaggctacgatcatctggaactgaacggcaaagttactgcgctgttcatcgacggcaaagcggttgatagcatcagcgcgggccaggatgcggttgtgatcctcgaccagactccgttctatgcggaatccggcggccaggtgggcgataaaggcgaactgaaaggtgctggcttctccttcgcggtcagcgatacgcagaagtatggccaggctattggtcatatcggtaaactcgccagcggttccctgaaagtgggtgacgcggtgcaggccgatgtcgatcaggctcgccgtcagcgtatccgtctcaaccactccgcgacgcacctgatgcacgcggcgctgcgccaggtcctcggtacccacgtggcgcagaaaggctcactggttaatgataaagcgctgcgttttgacttctcgcattttgaagcgatgaagccggaagagattcgtgcggtagaagatctggtcaacgcacagatccgccgtaacctggctatcgaaaccaatatcatggatatcgatgccgcgcgtgaatccggcgccatggcgctgttcggcgagaaatacgacgatcgcgttcgtgtactgcggatgggcgatttctccaccgagctgtgcggcggtactcacgcggcgcgtaccggtgatatcggcctgttccgtattacctctgaatccggtaccgccgcaggcgtgcgccgtattgaagcggtgaccggagaaggggcgattgccagcctgcatgcgcagagcgatcagctcagcgatatcgcacagctgctgaagggcgatagccacagcatcggcgataaagttcgcgcgacgcttgagcgtacccgtcagttggaaaaagagctgcagcagctgaaagagcaggctgcagcgcaggagagcgctaatctctccagtaaagccgaagaaattaacggcgttaagctgctggtcagcgagctggacggcgttgagccgaaaatgctgcgtaccatggttgatgatctgaaaaaccagctcggttcgacggtcgttgtattagctacggtagcggatggtaaggtttctctgattgcaggtgtgtctaaggatgtgacagaccgcgtgaaagcaggggagctggttggtatggtcgcccagcaggtgggcggtaaaggggcggtcgtccggatatggcgcaagccggtggtaccgatgcgtctgctctccctgctgcgttagccagtgtgaaaggctgggtcagcgcaaaactgtaataactataaacgcatagatgccgtaacctgatgggagcggcatcttgcgtcataagtactgataacgataaagtcgggttgaagttgtgtagatcggctaaacttaggtttaacagaatgtgatgccgtgactgcttacaccgcgaggtgtttgtcatcgcttactttttggcgttatatgatggataatgccgggatgcgagagacccgactcttttaatctttcaaggagcaaagaatgctgattctgactcgtcgagttggtgagaccctcatgattggagatgaggtcactgtgacagttttaggggttaagggtaaccaggtacgtattggtgtcaacgcccctaaagaagtctctgtacatcgtgaagaaatctaccagcgtatccaggctgaaaaatcccagcagtccagttactaagctttccgcgcctcgctttattgtgaggcgcatccctccggcggtcgtttttctcttttcttctccagtttcttctcttgcgacatcttctcttttgtttttattcgccgtgcgtcatttttcgttgtcgcttttgagtggccgtaaagggctatttcctgttgataaaatactctttttgccgtttttgcaggctaattgcgcgtgaagtgtgcaaacggaaaaagctctcgaaaaattgtttgacttataagtctcagaaagtaatatgtgcgccatcgcagcgacgaagagcagaaacaagttcttcgaagcactcgcaagaggcgtgttgtgtggtgaggtggccgagaggctgaaggcgctcccctgctaagggagtatgcggtcaaaagctgcatccggggttcgaatccccgcctcaccgccattttgcatccgtagctcagctggatagagtactcggctacgaaccgagcggtcggaggttcgaatcctcccggatgcaccatcttctctttgtaaacagaaagaagaacgctgtgaaagcagcggcccgcagtgcgaggcgtaatcgagtcactctaccgattactccatcatactcagtgtggcatgtgttagttgtgacactgacgcgtagtaaagcaagtttcccgatgcatccgtagctcagctggatagagtactcggctacgaaccgagcggtcggaggttcgaatcctcccggatgcaccatattctccttagtaacagccataccgttgttacatggtctgcgaaattttcgccagcaccagggaggataacgttgcgtcagcaacggcccgtagggcgaggcgtagacgagtcatcctcccggatgcaccattcttgcctgattctgaattattcagatgaattctgtagtaaactagttattccgatgcatccgtagctcagctggatagagtactcggctacgaaccgagcggtcggaggttcgaatcctcccggatgcaccatattctccttaataacagcgacgacgttgttttatggtctgcgaaattatcgcaagcaccagggaggataacgttgcgtaagcaacggcccgaagggcgaggcgcagccgagtaatcctcccggatgcaccatattctcgctacgagatttgcaacagaataacctcgcagttaaatagctttcccgatgcatccgtagctcagctggatagagtactcggctacgaaccgagcggtcggaggttcgaatcctcccggatgcaccatattctccttagtaacagcaatctcgattgttgcatggtatgcgaaattatcgcgagtaccagggaggataacgttgcgtcagcaacggcccgtagggcgaggcgcagccgagtcatcctcccggatgcaccattttctcttcaataaaactctccaattttcatccaatcagtacgacgtattttatctcctcgataatcaacacatttcttattggcaagtcgctctttccactataatttatccctgtagatctacctgaaccgggtgtgatgaatgcaaggagagaaatcaatgaaatggttcaaagcaatacctgccttttgcgcaacgcttctggtcgccgtatctctggcaggttgtgccggatcgtccaccaaagaaagcaccggcggttatattgacgataccgtggtaactaccaaggtaaaaagcgcgctgtttaacgaaaaagatatcaaatcctcagaaattagcgtgcagacctttaaaggccgcgtacagctgagcggttttgtatcgtcggctgagagcgctaaacgtgcggtagaggtcacccgtcgcgtgcagggcgtgcgcgtggttgagaacgacctgcgaatcaaataatacggttttcgctatcccgagttgattaaggcgcctgcaggcgcctttgctgtctctggctcccccgcgacaaaacccgccttttgcgatacagtaacgtttccttatccggtttgtgagaacacgatgtaccaacgttacgcaggactgattttcgatatggatggcaccatcctcgataccgagccgacgcatcgtaaggcatggcgtgaagtattgggccgttacggtatgcgtttcgatgagcaggccgtggtcgcgctcaacggttctccaacctggcgtattgcccagacgattatcgagctgaatcaggctgatttagatccgcatcgcctggcgcaggaaaagaccgtcgccgtcaaagcgatgctattggatagcgtacgcccgttaccgctgatagacgtggtaaaagagtggcatggccgtcgcccgatgtcggtcggcaccggtagcgaaagcgctgtcgccgaagcgctactggcgcatcttggcctgcgccactatttctccgcggtggtggctgccgatcatgtggtgcagcataaacccgcaccagataccttcctgctgtgcgcggagcgcatgggcgtcgcgccggaaacctgcgtggtcttcgaggatgccgacttcggtctggaagcggcgaagcgcgcggggatggatgctgtggatgtgcgtctgttgtgagcgacgcgctgtcgctcctgtcgctttttgccagcagctttttaagcgccactttactgcccggcaactcagaagtggtgctggttgctatgcttcttacgggggcaagtcaaccgtggctgctggtattaatagcaacaatcggcaatagccttggaggggtaactaacgttattctggggcgcctgtttccgctgcgcaagcaatcgcgctggcaggagagggcaaccggctggcttaaacgctatggcgcggtgacattattattgagctgggcgcctgttataggcgatttgctgtgtttactggcgggatggatgcgcatttcctggggaccagtgctcttttttttatgccttggtaaggcgttgcgttatatcgccattgcggcggcaacccttcagggcatgacgtggtggcactaattggactgattgttcaaccattacaattatgctaattcaaacgatttcgacaggcgggaggtcaaattgatcccggatgtatcacaggcgctggcctggctggaaaaaaatccgcaggcgctgcaaggcattaaacgtgggcttgagcgcgaaacgctgcgcgttaacgccgacggcacgctggccactaccggccatcctttagctttaggttcggcgctgacccataaatggattaccactgattttgctgaagccctgctggagtttattaccccagtggatggcgatgtcgatcatatgctgactttcctgcgcgatgtgcatcgctacaccgcccgccaactcggcgacgagcggatgtggccgctgagcatgccgtgctatatcgcgccgggccaggaaattgaactggcgcagtacggtacctctaacgttggtcggctgaagacgttgtatcgcgaagggctgaaaaatcgctacggcgcgctgatgcaaaccatttctggcgtgcactataacttttcgctgccgatggcgttctggcaggccaagtgcggcgtggaagacgccgaaagcggcaaagaggcgatctcggctggttatttccgctcgattcgtaactactaccgtttcggttgggtgattccgtacctgttcggcgcgtcgccggcgatttgctcctcgttcctgcagggtaaaccgactactctgccgtttgagaaggccggaaacggcatgtattacctgccatacgccacttctctgcgtcttagcgacctcggttataccaataagtcgcaaagcaatctcggaattacgtttaacgatctgcacgagtatgtggcaggattgaagcgggcgattaaaacgccatcggaagagtacgctaaaatcgggcttgagaaagacggaaaacatctgcagatcaacagcaatattctgcagattgaaaacgagctgtacgcgccgattcgaccgaaacgcgtgacccgtagcggtgaaacgccgtccgatgcgctgctgcgcggcggcattgagtacatcgaagtgcgttcgctggatatcaacccattctcgccgattggcgtggatgagcagcaggtgcgcttcctcgatctgtttatggtctggtgcgtgctggccgatgcgccggagatgagcagcagcgaactgctgtgtacccgtactaactggaaccgggtgattcttgagggccgtaaaccgggcctgacgctggggattggctgtgaaagcgcgcagttcccgctggcgcaagtcggtaaagatctgttccgcgatttacgccgcgtggcgcaaacgctggacagtatccacggcggcgaggcgtatcaacaggtgtgcgatgagctgcaggcctgcttcgacgatccggaattaactttctcagcgcgcattctgcgttctatgattgaagaagggattggcggtaccgggcgtaagctggctgatgagtatcgtacgatgctgcgcgatgaaccgctggaaattctaagcgaagatgattttatcgccgaacgtgatgcgtcggtcgcgcgccagaagaaagtggaagcggaagatagcgagccgttcgaggcgcttttagcacgacacgcgtagtaaaaagcgctacaaaagaaaaaggccacatcactgtggccaaactttcatctctgattcagggatgatgatgataataaatgcgcgtctttcatatactcagactcgctgttgaacgaagagttcattttattttaaaaaaaatcactatcggaggtgaagaatgccgttgttagatagtttcacagtcgaccatacccgaatggaagcgcctgcggtgcgcgtcgcgaagaaaatgaacacgccgcacggcgatcaaatcaccgttttcgatctgcgattctgcgtaccgaaccaggaagtgatgccggagcgcggtattcacactctggagcacctgtttgctggtttcatgcgcgatcacctgaacggtaatggcgtggaaattatcgacatctctccgatgggctgccgtaccggtttctacatgagcctgattggtacgccggaagagcaacgagtggccgatgcctggaaagcggcgatggctgatgtactgaaagttaaagatcaaaatcagatccctgagctgaacgtttaccagtgcggaacctacaccatgcactcgctggaagaagcgcaggatatcgcccgccacatcattgagcgtgatgttcgcatcaacagcaatgatgagctggcgctgccgaaagaaaaactgcaagaactgcacatctagtgcgcatgcgtcggcccggccatcgcgtcgggccgctctccgcttatcatgtcgacaacgctctccttttccttccagcaccgcgcgctggtgccatttgcccatgattacgcccacggcgatagcgaaccgatgcattgccacgattgcgctcaattgttgcatattctcagcggcgtggttcgggtggaaacgccggtcggattctgggtcgtgccaccggggcgcggcgtctggctaccggcacatacgccgcacgcgttgcgcataaccggcaatgtggccgcgcggacgttatttatcgatccgctggcccgtgccgatctgccctctacctgccagatcgtgcagatctcaccgctgctgcgtgagcttatcgtcgcgtcgctggcgctggaagagcgctattttcccgggactcgcgacgaacgtatctatgaactgatgttggatgaaattcgtgggatgtcggtattacctttcggtttgccggaaccgcatagcgatagcctacgtcggttatgccagcgggtgcgcgaagcgcccggtgaaccgtggggcagtcgtgaggcggcgcaagctggcggaatgagcgagcgtacgctgaaccgccattttcaacagcagaccagcctgacgtggagcgaatgggtgcgccgggcgaagttgatggaggcgctggttcgcctggcgcaggggcagtcggtgctacgggtggcgctggatcttggttacggcagccacagcgcttttagcgccatgttccgccgggtaatggggaccgcgcccagcgactattttcgcccgttggattaatccccggcgtgaacggcattacacaacgcctgtaacgacgcgcgggcaacgtcattatcaatacctacgccccatcggctttcgccattggcaaagacgcagcgaatataggcaacggagcggctgtcgctgcgtgccccgagggtatgttcgtggtagtccttaataacgaaatgacgttttaacagcgcgctcaggccgttggcggcggctgataacaaaccgttaccacgtccgttcaagcggcgggtttcgccattaatccgcagcgctgcctgtagggtcagttcgccatcctgctggccgtcgctctgatagtcgagtaacgccagctctggctgcgccagcaggccataacggctgcgaaacagctgccataatgcgttatgggtcatttctttaccatggctatccgtttcttgctgcacgtactggctgaagtcctgctgcaacgcccgcggcagcttaagaccgtggttctgctcaatcagccatgcgctgccgcttttacctgactggctgttaacgcggatcaccgcttcatagctgcagccgatatcctgtgggtcgataggtaaatacggcatttgccagcgttctcccggtttacgggcatcaaacccttttttaatggcatcctgatgcgaacccgaaaaggcggtgtaggccagactgcctgcccatggatgccgtggatgtaccgggagctggttgcagttctcgacggtctccaccacccgattcatctgcgtaaagcgcaactgcggatccacgccctggctatagagattcatcgccagcgtgaccagacagacgttgccggtgcgctcgccattgccgaacagacagccttcaacgcgatcggcgccggccatcaccgccagttcggcgctggcgacgccggtaccgcgatcgttatgcggatgcacgctgatacacacatcctggcggcgcgagaagtggcggcaaaaatattcaatccgatcggcgtagacgttcggcgtgttgacttcgaccgttgccggaagattaataatcattggccgttcgccgcagggctgccagatttccgccaccgcttcgcatatttcaagggcgaattccggctcggtaaaacagaaggtttccggtgagtattcatattgccaatgggtgtccggctgctgctcgcaatgctgacgaataagccgggtggcgcgggtggcgagctcgatcacttcggccttttccataccgaaaaccagctcgcgaaacagcggcgcggtggcattgtagagatggacggtcgcctgtctggtgccgcgcagcgcttcaaaggttcgttctatgagttcttcccgcgcctgagtcagtacttgaatggtgacatcttcagggatgcgctgctcctcaatcagctggcgcacaaagttgaagtcggtttgcgaggcggaggggaaggcaacctctatttctttaaaaccgcactccagcaacagatcccagaactgcagtttacgcgcggcgtccattggttcggccagcgcctggttaccgtcgcgcaaatcggtggaaagccagcgcggcgcggtagtgatttgccgctcgggccagcgtcgatcgggcagggcgataggcggataagggctgtatttttcgcaaggattggtcagcatggtgttctcctgtagtcggagctttatcctgcatgacataacgcatcggcggctttagcgaaatggacagaagctagcgcgaaatggacaaggtcgcggcaataaaaaagggacccgtaggtcccttttgttgatacttagtgtgcgcctccgccaccgccgccggcgctgaacggcggcctggcgaaccacaccaggcctagcagaaggataaagatccccgctgagacccagaagatttcattggcggagataatcaacccctggttggttatctgctgggcaatccagccggaagcctgctgctgggtcattcccatgccctgtagttgatcgtacatctgctgggcgttggggttgaacggcgtcaccgactcggtgagctgcgcatggtgcagcgcctcgcggttggtccacatggtggtggtaattgaggtaccgatggagccggcaagggttcgggtaaagttcgacaagctcgacgccgccgccagccgctccggcgggaggccagagagagtgatggtggtcagcggcatgaagaaacaggccaccgcaaagccctggataaactgcggccaggccgatgcgccaaagtccattcccggttcaaaggtccacgcgcgccagtagaagcacaccgcatacataataaagctgaaggtcaccagccgccgcatatcgagcttatgggcaaagcggccgataatcggcgacagaatgaccgggatcactccgaccggcgccgaagccaaaccggcccaggtggcggtgtagccgtatacctcctgcagaagctgcggcagcaatacaatggcgccgaagtagagcatataggccaggctgatacacaaacagccgatggtaaagttacgcgacttaaacagcgacaggtcgactatcgggttatcgtcggtcaactcccagacgatgaggaaactaatcgccaccaccgccacgatggtcaggatgataatctcgttggaggcgaaccagtcgagctctttaccgcggtcgagcataacctgcaggctgccgatcccgataatcagcaacgccagcccgacgccgtcgatacgccgctgttcggtgcgggtttcgcggccgcgcagggtttgcagcgtcatgagaaccaccgccacgccgatcggcacgttaatgaagaagatccagccccagtggtagttatcactgatatagccgccgagaatcgggccgcaaatcggcgcgacgatgaccgtcattgaccacagcgccagcgcgattgaacgcttcgctggcgggtagttgctgagcagcagactctgcgatagcgggatcagcggaccggcgacgatcccctgaatcacgcggaagaaaatcagcatcgtcagactgttggataccccgcaggcccaggaggcgatggcgaacgccaccgtcgaccagacgaagagtttcacttcgccgacgcgcttcgccagccagccggtaatcgggatggagatagcgttcgccaccccaaatgaggtgatgacccaggtcccctgactcagcgacgagccaaggttaccggcaatggttggaatagccacgttggcgatagtggagtccagcacctgcatgaaagtcgccagcgacagcgcaatggtcatgatgaccagttgcgcgccttcgagcggtttttgctgttgcattacgctcaccccgaattatccggcgttggcctggatgataccgtcgatcagtttgttcaccggctcaaggccgatttcacgggcattactttcatagaccggcgagctacgtacctggcttgccagcatctcgccttcgcgattgctggtgtctacttcaaccagcgtcgacaggccgatgcgcagcggatgttgcgccagctgtttagcatctatctcgatacgaaccggcagacgctggacgactttgatccagttaccggtggcgttttgcgctggcagcagggagaaggcgctgccggtacccatatccaggccgaccactttaccagtgtacttcacgtcatcgccgtagatatcgctgatgatggtcgccggctggccgatacgcatatgagcaagctgggtctctttaaagttggcgtcaacccacaggttggtggccggaaccaccgccatcagcggggtagtggtaccgatctgcgcgccaggctgcaccgagcggcgggaaacgtagccgctaatcgggctgacgatttgcgtacgctgcagcgccagccaggcgttgcgaacttcggtcgccgcctgcagcaccgccggctgctgttccagtttggtgcccagtacgatcgcctgattggcgttgtactgttgaatggcgacgtcgagttcggcctgcgcgctggcgacggtgtcacgagcatgctgcagttcttcgcggccaatcaggttcgcggcgcccagcgggatacggcggttaaggtctgcctgcgcctgggcgagggcggtttttttgacgtcaatattcgcctgcagctgcttactgttgatcatctgctggcgagtctgacgcacgctagccgccaactgggttttggctttttcaaaggcctgctgggcgtcggtctggtcgagtgtgaccagcggatcgccttgttgcacaaagtcggtgttgtcggcccagaccttggtgacgctgccggaaacctgcgccatgatctgtacctggttccctgccacataagcgtcatcggtctcttcataatgacgcaggactaaaaaccaataaatgccgtaggctacggccacaataacaaagagcaaggtcaggagcagaagggcgcctttgcgtttccctttcttgctgcctgattgctgcggagtttggttcgccgcattttcgctcatctgattctccacaattttacattcttattatttcacatcggctgagccgacctgtttaccagaaaggccagcagaagatctgctggcctgaccgtgttccttgcaactcaaaatattgtgcggctccgcgcttagcgtaaggagcccgccagcgcgccgtcttcttccatttggtcgaggcggccaagcagtttgcgggtgatgtgctccagttggtctttttccgcggtgcttaaagaagaccacagctggtgcagacagttgtgctgcggaggtaatacctcgcgcaagaattgatgacctttatcggtcaactgcagatgcaggcagcggcgatcgttgtcgctttcacgacgctcgatccagccgcgtttttccagttcgtcggcgatgcgggttgcattagtgcgtgacgaacccagcgcgcagctcagctcggaaggttgaatgctgtgattttcctgagactcaagcgttatcagcgccataaataatgtctcgttaatcccttgcgctttcagcattttgttacggttttccagcagcttaccctgcatgtgcatacagagacgggtgaggagaatctcctggaaagggaaatcttcatggcggctggcgcggaatttgagcatctgctcaatgggagtaaacgaactatccatttgggtataacctcattaattacagccgatataataactattgtgacaaataaagcaaatgaattattggtcactattaatacttaaaaatctccggcgagacgccgattttccatgcccaaccataggctaaagcgctgagttgcgtagggataataatgctgttcgccacctgaacgcgacgaaacctacccgtgttggtagccactggcgctgacgtcatggagcaggagtttctatatcggtgacttattgataacgctggtgaaaattacgcctggaaagaattattcaccttagcagacggcgcgatggcttcacaatcgctaaaacgggaaatcagaaaatacgcatttttatgcatattcgtttcatgctggtacaggggaaggcagtccccacggcgataaaccgccgtggggagagggggaggaattacttctgcgccgccagcgcttctttcacccagccgtcgaacaactgctggtgggctttaatccaaccatcaacgtggccgttgatgtcggcttctgaagcatggccggcatgcatcatcgcgttttcagcgttgatatcggcaatcggcagcttcatcaggctaaacagctttgccgccgccgggtttttctcggcccaggctttgttggcgacgatatgcatggtgttcaccgggaaaccgtagttgacgccgttcggcagcttggtgtcgatatctttctgttctcccggcagggaggagaacggcacctgcagccagaccacatctttacccggtttcagcacgtcgctgacccagtatggcgtccaggtataataaagaattggtttgccttctttataacgggcgatggtatcggccatcatcgccgcgtagttgccctggttatggaccactttattgtttagcccataggcatcaatctgatggttgatgaccgcttcgcagccccagccgggggtacaaccggtgagatcggctttgccatcgccgttggtatcaaacagtttggcgatcttaggatccttcaactggtcgatggacttaatgtggtactgctcggcggttttcttatcgatcaggtagccctgcgccgcgccggtgacgaaggtcccttcacggtagaattttttatcaccgcccgccgccgcgtacatatcatcgtgcagcggttgccagttggtggcaataaaggtggtgtcgccagaggcgatggaggtgtaggcgacgttatagtcgacctcgctcggcttttcgacgttatagcccagtttttccagcgcgcggctgaccagcagcgtctggaaggtttcttctgaaatggtactctgcgccggtttcacggtgatgcctttacccggcagctcggcagcaaacgcgctggtcgtgacgagggcggtaaacgctgtggcaaggagtgtagtatgtcgcatcgttattccttctcttatttacagaaagggcgggtaatcagccccagaggtccggtggcgtaccagcggcgattaccgcggctgcgggaatcacggccgacggcttgagtcaggcggtcgaggataatcgcgaggataacgatcccgaccccgccgacgctcgccagccccatgtccaggcggccaataccgcgcagcaccatttgaccgaggccgccgacggcgatcatcgaagcaataacgaccatcgacagggccagcattagcgtctgattgactccggccatgatggtcggcatcgccagcggtagctggactttaaacagcagctggcgcggactggcgccgaaggagcgtgaagcttcaatgaggtctgccggcacctggttaatcccgaggatcgtcaggcggacaattggcggtagggcgaagataatggtcactaccacgcccggaacgttgccgataccgaacagcatgacgatcggcaccaggtaaacgaacgccggcgtagtctgcatcgcatcgagtaacgggcggatgattttcgccgcccgcgggctacgcgccagccagatccccagcggcaggccgattatcatgcagaacagcagcgcggtcagcaccagcgccagggtgaccatcgcctgcgaccatgcgccgatagcaccgatggctaccagcgagaccagagtggcgatacccatgccgacgctggagatctgccaggcgatcagcgcgaagagaataatcgctaccggcgccggcatccccagcaacagttgctggaaggcgctgagaatataatccaccggcacgcggatcccctggaacaggggcggaagtgcagcacgatccagtcgatggcgtgggtaacccagctatcgagcgggatcagcgttttatggaacggatccataatattgaaatgttctggctgtggcgcaggcgcgctgttaagccagtcggcgccgccgccgttagcgggcgccggtgttgggttgccccaggcgtcggcagactgcgccgcgttatccgctggcgctgcggtatcccatgggtttgattgatcagccattgtttgccccctcgcgatctaaagcctgtagcagcatgcgttttgaaataatgccgagatactggtgtccttcatccaccaccgggacggcgcacggcgcctggccaacgtgggagagcaggtcgctgagcggcgtttgtgcctccaccgcctgcggggagtcaattaacgccgcttcgaggccctgattttcgctcagtgcgcttttcagagagtcgatggagacaatgccgacaaacttattaccgcgttcaatgacgtagccatattcacggtcttcatcctgcaataatttcagcgccgaacgtgggccgaaaccgggggttttacgaatcaggccaaccgggctacggcgggcaatatctttagcgctaaatacctgactaatatcgacgccacggaagaaagtacgaacgtaatcattcgccgggttattcagaatttcgtcaggagtgccaatttgcaccacttcgccattttgcataatggcaatacgatcgccaatacgcatagcttcatcaaggtcgtgggaaataaagacgatggtacgttgatgcttcgcctgtaatttggtgagctcatcctgcatttcagtacgaattaacggatcaagcgctgagaaggcctcatccatgagcagaatatcggggttgatcgctaatgcgcgggctaagccgacgcgctggcgcatcccgccggaaagttcgtcgggataggcgtgcgcataattctccagtcccacctgacgtagcgcatccagcgctttctgttggcgttcttcggcggaaacgccggccagttccataccgaacgcggtgttatccaacacgttcatatgcggcatcagggcaaatgactggaacaccatcgcaatctttttcctgcgcacctcgcgaagctcggcctctgaaattttggcgatatccacgccgtcaatcagcacttgtccgcgggtgggttcaatcaggcgattgagaaggcgaaccatggtggattttcctgagccggaaagtcccatgatgacaaatatctcgccttcttcaatggccagattggcgtctttaacgccaagcgatagccccgttttttccagtatttgctctttgctaagtcctttttcaatatatttgaacgcgcgttgcggatgctcgccaaatatcttatagagattcttaatttctaatttaactgccatgcaataaatgatttcctgtttttaattatatcgatatcgtacctggttaataaatttacctttttacaccctaacatactgagattctgtgacaacccttcacgtgaatgattatcccaattttgagtcaggcaaatccgtgaattgcccatgatataagggctgagccatcatctacggcagataatattttttatttatgcatgaataatgaagggagaaatcggtgtaaatgaaggaaatatgacacgaaaatggccaggggttatttgtgtgataatagaaaataatgtgaaatagatcactggagaatatgtcgatatattccccagcgatcgcgagattaaaagtcccaatcgtcgtcggcggtcgcttcagttttacccatgacgtaagaagaaccggagccggagaaaaagtcgtggttttcatcggcgtttggcgacagcgccgcaagaattgccgggttcacggcggccatttccgccgggaatagcgcctcatagccaaggttcatcaatgctttattggcgttgtaacagaggaacgcgttgacgtcgtcaagccacgggctgtcggcatacagttcgcgggtataagccagttcgttatcgtatagatccatcagcagatcaaaggcgaaattttttaactcctcacgcttcgcggcgctgacgatttccagtcctttttgatatttatagccaatatagtaaccatgcaccgcttcgtcgcgaataatcaggcgaattaaatcggcggtattggtcagcttgccgcggctggaaaaatgcatcggcaaccagaaccccgaatagaagaggaaagattcgaggaacacgctggcgatttttttcttcagcggctcatcggcctggtagtaattgagcatcaactgcgctttgcgctgtagcggagcgttctcctcgctccaggcgtaagcggcatcgacatctttgctctggcacagggtcgagaatatcgaactataggagcgggcatgcaccgcctccataaagctaatgttcgacagcaccgcctcttcatgtggagtgagggcgtcggtcatcaacgccggggcgccgacggtattctggatggtgtcgagcagcgtcagcccggtaaagacgcggatggtcaactgctgctcctgagccgtcagggtctgccagtgcggaatgtcgttggacagcggcactttctccggcaaccagaaattactggtcagccggttccacacttcgaggtctttatcatcctcgattttattccagttaatggcgctgatgcgcgataagtgggtcatcctgttctccttacagcgcgcaggacacgcagccttcgatttcggtaccttccagcgccagctggcgcaggcgaatgtaatacagcgtcttgatacctttcttccacgcgtaaatttgcgctttgttgatatcgcgggtggtggcggtatccgggaagaacagcgtcagcgacagcccctgatcgacatgtcgcgtggcttcagcataggtatcgataattttttgcgggccaatttcccaggcatcctgatacagcgccagattgtcgttagtcataaacggcgccggatagtacacgcggccggttttaccttctttacggatctcgattttcgccacaatcggatgaatgctggaggtggcatgattgatgtaagagatcgaaccggtcggcgggatcgcctgcaaattgcggttataaataccgtagcgcatcacgtcgtcgcgtagctggcgccacatctcacgatcgggcagggtaatccccgcacgggcgaacagttcgcgcaccgtggcggttttcggctgccagtcaccctgcaaatactgctggaaatagtcgccgctggcgtaacgcgactgctcaaacccggcaaaacgcacgccacgctcgcgcgccattgccatagaggtgcgcagggcgtgccaggtgacggtgtagaaatagagattagtgaagtccagcccctccgggctgccgtaggcgatcccctcgcgggccagatagccgtgcaggttcatctggccaaggccgatggcgtgcgatgcggcattacccgccgccaccgatggcaccgagcggatatcgctcatatcggagaccgccgtcaggccgcgaaccgccacttcgacggtgcgggcgaagtccggcgaatccatagcgtgggcgatattcagcgagccgaggttgcaggaaatgtcctcgccaacggtggcgtaatcgagattttcgtcaaaggtggaggcgctgttgacctgcaggatctccgagcagaggttgctcatattaatgcgcccggcgatcggattggcgcggttcaccgtatcctcgaacatgatgtatggatagccggattcaaattgaatttccgccagccgctggaacagatcgcgggcgcggatccagcgtttacgaacgcggtcgtcggccaccagttgcgcatacatctcgctgacggcgatatcgccaaaggctttgccgtacagtcgctcaacgtcatagggcgagaacagcgccatctgcgcgtcttctttcgccagctggaaggtgatatccggaatgactaccccagcgacagggttttaatgcggatcttctcatccgcgttttcccgcttggtatcgaggaaacgcaaaatatcggggtgatgagcatgcaggtaaaccgcgccggctccctgacgcgctcccagctggttggcgtatgagaaggcgtcttccagcattttcatcaccggcaccaccccggaggattggttttcgatacgtttaatcggcgcgcccgcttcgcgcaggttggagagcaggaacgccacgccgccgccgcgttttgacagctgcagagcggagttcaccgcccgaccgatcgactccatattatcttcgatacgcagcaggaagcaggagaccagctcgccgcgctgctgtttaccggcgttgaggaaggtcggcgtcgctggctgaaagcgcccggcgaggatctcatcggccagctgtcgcgccagggtttcatcaccctgggccagggttagcgccaccatgcaggcgcggtcggcgaaatgctccaggtagcgtttgccatcgaaagtgcgtaaggcatagctggtgtagaacttccacgcgccgagaaaagtacggaagcgaaaaccatgttgatgcgcgtgggcgaagagggccagcacgaaacgacgctcatagcgggccagcactgctggatcgtaataaccttcgtcgcttagccattgcagtttctcctccagcccggcgaacggtacgctgttggggcgcacgtggttatggataaatgcttcgaccgcctgttggtccttttccaggggaatacggccgttgctgtcgtataaattcagcatcgcattgagggcgtggaaatcagacgccccggcggttacacgttctgcggttgtcgttgccaaaattcgcttactcctttacgcacgttgtcgacatcttgctgggtacccatcagctcaaaacgatacagatacggcacgccgcatttctgcgcgatgacctctcccgcccggccataggcctcgccgaagttacggttaccggcggcgattacgccgcgaatcagccggcgattatgcggatcgtttaaaaagcggatcgcctggcgcggcacggcgcctgccgtcccgccgccgccgtagctggggacgatgagaatatagggttcgtctacctgaattcgctcgcgctcgttgagcgggatgcgcacggcaggcagcgccagacgctgcacaaagcgatgcgtattttccgagctgctggagaagtagacgatgaggctcataggctggccgtagccgcggcgggacgcaggcgattaatcatatcggggcggaagccagaccagcgggtttccccggccatcaccaccggtaattgctggaatccctgctcgcgcagcatgtcgatggcttccgggtgttggtcgatgttgaccatatcgaaggcgaaaccgcggctttccatcgcgcgtttggtggcatggcattgcacgcagtcatttcgagtgtaaataataatgcgcatgattcgtatttccatttaagataacaggacggcgtaaaagatcgcgtcgaacgttatgggcttactgttcaggaaatactagatgtagttatttaaaacttcaaccacgcaatatatagagtttttcgataaattatccccaccgactagcccggcggggagggaagtcgatacccgaaaattacatccgcatcgcgacggctagtcggttgaaggcgttcatcaggctgatggcgaaggttaaatcgctaatctggcggggcgtaaaatgttccagtaaaggcaggtacacttcgtcttcagcatggctggcggcaatgtcggtcaccgattccgcccatgccagggccgcgcgttccgcggcgctgaaatgggcgcttacgcgccagcctgccaacgcatccagtttgctctggtcaacgccggctttgcgtaacgctttgctgtgcatctcaaggcaaaaagcgcagccgttaatttgcgacacccgcaaatagaccagctccaccatcgtgctacccaattcgcttttttccagcgctatgctggcctgaaccaaccccttatagatttccgagctcagttcgctgtacggctgacgtaatgtggtcatcttgcagttctcctctctaagacccgggcaaaatagcactataatggactgcattagatagccatattgtgatgaaaaaagcagaccataatggaagccaaaaaagtgccgcactaccagcgtatcgcccgccagctgaaatcagcgattgagaatggcgagctggcgccgggaagccgcctgcccgcgagccgggtttatgcgcaggagcagggcgtgtcgcgggcgacgattgaaaatgcctggggcgagctggtggcccagggctggctggagcgccgcggccaggcaggcacctttgtcagcgagcgcctaagcccgcggcaggtcacggctcagcgccctgcggcgggccggggatcctccgcgccgcagccttttcaaatggggctaccggcactggatcttttcccgcgcgggttgtgggcgcgggtgatggggcggcggctacggacgcaatcgcgcttcgacctcgcgcccggcgatccctgcggcgaaccggttctccgtcaggcgattgtcgactatttgcggctgtcgcgcagtatcgagtgccagcccgagcaggttgtgattagcggcaactatgcggcctcgatggcgctgattttgcgtacccttgcgcagccggggcagcatatgtggatggaggatccgggatatccgttcattcgcccggtggttagcgcggcgggggtaaatatcgatccggtaccggttgaccaacagggaatggatatcgactgggcgcaggcacactctcctcaggcgcgctttgcgctgttaactccagcgcatcaaagcccgctcggcgtggccctatcgctggagaggcgccgccaggtactgcagtgggcggcgcagcgcgatagctggattattgaagatgattacgacagcgaatttcgctaccacggtaaaccgttaccgccgctgaaaagtctggatgcgccgcagcgggtactgtacgccgggtcatttagtaaatcgatgtttcccgcgctgcgcgccgcctggctggtggttccgctgccgttggcggcgcggtttcgccgtcaggccgaattgagccactgtaatgtgccgaccttatggcagcagacgttagcggacttcatcaatgacgggcatttctggcgccatctgaaaaaaatgcgcgccagctacgcgttgcgcaggcagtggctggagtcggcgctgcaggcgcagggttttcaggtggtaccgcagtccggcgggattcaactggtgatggcggtgaagggtgacgatcgcgagcaggcccgtcgctgccaacgtgccgggctggcggtgcaggcgttgagcgactggcgcatgcttagccgcggtgagggcgggctattgatgagttttacgaatataacgtcggcggtgatggcacgtgaagtggtaggcgaacttaagcaagcgctgaccagcgtggaataacaaaaaaccctgcgtaccattgggacgcagggtcagacgcgtatttgttatcttcacatgtagtctatcaatactattatcgacgcaaattaagcaaaacgccaataaataccccaacggcggcggccgcgccaacgctctgccagggtttatcgcgcacgtagctgtcggcgcagccggcggcatcccgggcgcgctcaacggtatcataggccgcctggcgcaggcgggtattgccgttcaggcgggcacgcgtctctttgagcagtgactgcgcttttttacgcgcgttctcagcttcatcttttgcatcgctgccccatgatttcagcacctcttccagcgtatccgctaattggctgacttcgttatgaatatcctcggcgctttcatcaatgtcgttgcggttcagacggttagccattggtttctccctttgttccattcgagttattaagtgtaggacatgattttgcattatgcttttgcgggagtttatggaattttctgaaagcgctgctattcgtgaataaggtaaggtaaatgtgcggtaaaagataacgaggaatcagtatgtatttaagacccgatgaggtggcgcgtgttcttgaaaaagccggcttcaccatggatgttgtgacgcaaaaagcgtatggatatcgccgtggcgataattatgtttatgtgaaccgcgaagcgcgcatggggcgtaccgctttagttattcatccggcgctcaaagagcgcagtaattccctggctgaacctgccagcgagattaaaacttgcgaccattatgaacagtttccgctctatttggcgggggatgcgcagcagcattacggcattccccacggttttagttcgcggatggcgcttgagcgttttctgaatgggctgtttggcgaagctcaaccgcagatgtctcacggctaaatagtcaaatgcgggttggttgaaagcgggcgactggcagcggccagtcgctgaatgacaaggatcaggctttagcttgctgataagggctgacgcggaacaggcgacggcagaagtcgagaaagtagccgtacactgcacccatcatcattgataccagaatgtttgaactgaccgcggcggcaatttgatgccagtctgcgcctaccgacagcagaatcaatacatacaccggtgactggaaagtcacatatgcgacgacgtcagcaatgtttttcatccatcccgaggtgctgattcggcgcgcctggcgcatggcgaagtcgcgatagaagccataaggcaccgcaataataatgttgaccgggattgcgaccaggcgtgaagataacgactgctcaaaggtcattccggagaggaaaatttcgatcatcatattgacaacggtgcagtagaccaccattgcaaaggtgtctgctaccgcatgacgcaagcgggattgagcagagaacatcggtatgctcctcgaaaaatgaagtcaataacgccgaaaagtgcgcatggtgtagcggttttgggctgcctgttttgatgtgtgtagagtatatctctgtgtactaagtgacaactagctataaatttttatttatcgcctttttgtcgataaaacactctgtgaactggcgttttgctcagcttgcgctacttttgttcctttttttgattatattgtttaatatcaaatagatatgattttgttttgtaagttgacgagtaagcatgacaggtgaagggaggttaataaggcgggcgtctgattacgttatgtgatgctggtcactattggcgttatttactgtatgaatacctgtttatcagcatttgctgctgtatgtaaataatgggttttattctgattatgtgaatttaaattcattgtcgcaaagctattggcattccccacggcgggcgatgattttataactcactgaagtggctgtagatataatattatgaatattatcaggacactctatccattattcacccgcgctagccaggatttatgttctatttcgatatttcctaccaataaatttcagcgcgttcataggcgtaatcctgtacatatttatttgaataagctaaggctggaaataaatatacatatctattaaactgaccaggtaattcttgttttatttttttcgatttgggatttttgatctttatgtcttttatgttacaaaaactgaataatattcgctcactgcgtgctatggcgcgtgaattctccactgacgtgcttgaagagatgctggaaaagctcaggatcgtcactgaagaaaagcgcgctgagcagcagaaaacgcaacagcagcaggcggaatatcaggagaaaattaatacctggttggaattaatggttgctgatggtatttcacctgatgaattagcgctgcatgaaatgaccccggcgaaaagcagtaaaaagcgtaagccgcgtcccgctaaatatcgttataccgaccataccggcgcagaaaaaacctggaccgggcagggacgtatgccgaagccgatcgctttagccgtcgcgcaagggcaatcgcttgagagcttcctgatttaaatcgagtatgggttaaaacggtgggattccccaccgttttacttagcagacgccgaaatcgccttcttcactataaggcgtaacatcaaccgctttcagagtaaacttttcaccctgctcgttacttgcctgaacgacgaccagactatcgccattcacttccactaccttcaattttggcccgccgacgcgcggttgtaccagatcgcctgttgcaaacatggtgtttctcctgagcattggtcacaactaagaacctaaacgatagctcaacgacgctgacggattcaatgatcgtgctgttttttgttaaaacaatttgggggagatgtattatctttgttaatggttttgacggcgctgcggtgagggcaactaacgctgccagcgaggaatgattaaaaacagaacatggtcagataagcgaatatgaagtatatcattttacttattattataattgctgtgctctacgtccattatcgcggaaaggttcgctatcgtttctggcggcagctttccgatcattcaacttttaccgcgccgcttaatggctttatgtaccttttttctcgcgtgccaaatacgccgtatctacgcccggagacttttccagagttggcgatattacaaaagaactggttggttattcgtgaagaggggattaacctgcagcgtctggagcaaataaaagcggcggaaaaatataatgatgccggatttaactcattctttaaaaccggctggaaacgtttttacctgaaatggtatgaagacgcgcatccctccgccagccagctatgtccaaaaacgaccgagctgctgcgtggtattccttcggttaaagcggcaatgttcgccacgctacccgatggtagccgtttgcctcgccaccgcgatccttacgccgggtcgctacgttttcatctcgggctggcgacgccgaatgacgaccgctgttttattgaagtggacggcgatcgctacagctggcgcgatggtgaaggcgtgctgtttgacgaaacctatattcactatgcggaaaataccagcggtgagaatcggctgattcttttttgcgatattgaacggcccatgcgttaccgctgggcgcagaaggtgaaccactggctggggcgaaatttaatgagcgccgccgccgcgccgaacaacgtcggcgaccgcaccggcgggattaaccgcagcttccgttacatttatcaaatccgcattattggcaagcgattgaaaaaatggaataaaacggtttattacatcgtcaaatggctgctcttcggcggcatcgccctactcatctggcaggcgttttaacgccggttccacggcatgacggccagcaggcgcgccatgccgcagaaaccggtgaggccagcaaaagtgagccccgcgccaacgaaaccactcagcaagaaaaagctgctattgacggcgtagcccagcaccacgcccaacaaaatcagcgcgcctgcggcgatttgtacctggcgcattagcggcagcggctgggatttatcttcgactatcggcaaacccgccgcccgccacgcctgaataccgccagccagtagcttaacctgcgcgggcgtggcggcggcggccagaatgctggcgttattttgcgtgcgcgagccggcctgacagtgaaaaatgattgtttctcccggctgcgcattgagcaccgcgccgtgagttaattgttctaatggcagcagtgtcgcctccggaatatgctcgcgggcgtattcgtcggcagcgcggatatcaattaaccgcgccccctgggcgataagcgcctgggcttcgttagctgaaacggtagcgatagtcataaggggctccttacgggcagtagatggtcttcagcgtggcgatgacctgctgaacggcggggtgagtaatgaaatagcgcaggcgctgcgcatcgcgttcgcagtcgattagcccttcatcgcgcatccgcgcgaggtgctgagaggtggcggaagggctcaggccggtgatttgcgccagctcgcctgcggttgtacgcggggcttcgcagagcatgcacagaatcagtagccggtggggattgctcatcgctttcagcaggacagcggcttccccggcgctggcctgcagttgttgtgctgtggtcattttattttagaatttgctaaatttagattattctaaaataaaaaaagaccctttaccagcccgtatccgtataaagaacggagctcacgcctgctgagcggccctggcgatatgctggcgggcgtgggcaatgcccgcgtcgcggccgtgcgggcgaatatccatcccttcggcgtagataaattcgacgtcgctaatcccatcaatcccagcaccgcgcgcaggtaaggggtgaccgcatcgctgggttgcccgtcatggacgccgccgcgcgaactaatgaccaccgcacgcacgccttccactagtccctgaggccaggtctcggtgtagcggaaggtttcccgcgcccgcgccaccagatcgaaccagtttttgagatcggttggcacgttgaggttatacatcggcgcgccgatcaccagcagatcgctggcctttaactcgccgatgagtgaatcagagagggcaaccccttgctgaatcgccgggcgcgagtcttgcgcgccgcgcagcgcggcaaacagcgcgccgtcgagtttcggcaaggcgagggtggtcagatcgtgttcgacgaccgaatcctgatgaccagcctcgcggcgggtctgcatatattcatctattagctggttggttagcgacgcagggccgttgatgctggattttagaatcaaaacgttactcatgactggctcctcataaagttgatggtccgcagggtaacactgtctttttttctccagtagtgacattattttttataattgtatccattcaggaaccaatcaatgcgcagtgatttaaatgcgatcccggtatttgtcgccgttgtcgaatgcggcaactttgcgcaagccgcagagaagctgaacgtgacgcgatccgccgtcggcaagacgatttcccgtcttgaacagcggctcggcgtcgcgctgttccagcgcaccactcgccggcaggcattgaccgaagaaggcgaggtcttttatctgcaatcccgccgggcgctggatagcctgcgggatgcggaaaatgaaattcagcgcgggaaaacccaggtacaagggcggctgcgaatcagcctgccggtgctgtttggtcagcgctgcgtggcaccgatcttgtttcctcttagtcaacgttatccggagcttaagctcgagctgtcgtttagcgaccgccaggtcaatctgtttgaagaagggttcgatatggcgattcgtatcggcgcgttgaacgactccagctttcttaaggcccggcgtttaggccagcacggcatgattctctgcgcatcgccgttatatctacaacatcggccagcgccgcagacggcggaagagctgcacgcgcatcttactattggttatctctacgccgggcagatgcagaaatggcatttacgcgatacgcagggagcagcgttcgcgtttcgccctcagcccggactggcgatggatgatttcgccgccatcgccgcggcggcgaaaagcgggctgggaatcgcctggctgccggattggctggtggcagacgagatagcgcggggagaactccagcaaatattgccgtcgtccgtcagcggcagctttgctatcagcgccgtctggccggaagcggcatgggtgccgcagaaaattcgcgtggtagtagatgaactgctggcgcggctgccgcagcagttagccggtgggaaaaacctggaggactccttagcgtcaggttaagccggactttaggtatatcggcgatattgctgggggttgcctatggaacgctgtggttccatccgcggccatttatgatcccgctgggcctctgcgtggcaaaagtggtctggcatcggttggggcaggcgctggtggcgctgtgcgaagcgctgagccgccgtctcttctcctggctgccggcgcgctttacgccgtagtcacttcctttgtacgcgcgcggcccttcgatatagcgtgctgcgggcgacgcctaacgcctgcgccgctttactcacattgccgttaaagctggccagcgtatcggcaatcagctttgcatcatgttgttgaagcccgcctggagcgctggtttgctgcgcgctttggtattcctccggcagcgccgcgacgcccaggcattcgccatcgtccgccagcgccaacaggactttgagcaggctttgcaactgacgcacgttacccggccaacggcataatgtcagttgatgaatcagggcatcagagagggttatatgtcgttttgccgcgccaagcgagcgccacagcgctggaataaactgcttgagttcaggccattggcgtagcggcgggatggtaaaagcatactcgcgcaggcgatagagcaggtcttcgcggaatgcgccttcagcgacgcgctgcgcgagatgacggtgggtggcgcaaatcaaggcgaagttcaccggcgcgctgcgatttccacccagcggcatgacctctttttcctgcaatacccgcagcagacgggtttgcagagccagcggcatatcgccgatttcatcgaggaacaacaccccgccatcggcttcgcgaattttgccgatatagccgtttttattcgcaccggtaaaggcccccgcctgataaccgaaaagctctgattcaatcagcgattccgggatggccgcacagtttatggcgacgaatttaccgctgcgccatcggctatgcgcatgcagggcgcgactgacgaactctttaccgcagccggtttcaccttcgatacacaacgcgataccggcgttgagcaggcggaccattttctcgccttcgccggacggacaaaacggcaggttaagtgctggttgcgcggggacggcgacgctggcgcgggttggcgcgcgcaggcggtagtagtagccacgttgctggaaggtcatcggtagtggcacgctgaccgccgtttgcgtcaggcgggggaacaactgctggaaggtcatctgtccgatctgtccggcctgcaggcccagttcgcggatggccaggcgattggccgcggtcagcaggttatcggagaagaccagcagcagctcttcggcgctatcgagcttctgtacccgcgagtgcaggctcattaaccactgctgcggatgcaggctctgtttcacccacagatattcaatctgtttggcggcctctttaatccacgccagagagtggggatgcgggatatgcgccgggccggaaatatccagcgccccggcaatctggccatcggggctttgtaggggaaccgccgcgcagtacaaatcctgattacgggttaaatagtgttggcggccttcgactacacagctgtcgtcaatcgccagcgcggtaccgatagcgttggtgccgcgaccgctttcgctccagatattgccaggctccagcgcgaagctttgcgctttttccatcgctgcgctattgccgaaggtttggagcaccagcccgctggcatcggaaagaatcactaccgattgtagcccggcggcacgttgtgccagcggcgtcgccaccggttgcgccagccgttgtaggctgcggttgctttccagcacgtcggccagttcgccgccgcgcaggcgcggaaactcatcgctcgttggctgcaggccatagcgctggctgcgttgccaggagtcgctcagcagcgcgctggactgcgcctcgggggtgatagtgaacgggtttccttgcacggcgcacctcgtggtcggctgggttgtgttgcaatattgtagctatttggttttattggtgttgcgatttgcaacacagaagcgggatcctgtgcgacaaaaaggacgcgaattggcaagggaatatatttaattatatgaaaattattaattttattaggatttcgcaaaattggcataacccctgctacaggagaaagcgtgcagcggacaatagcaaaaaccaccacgccgctgcgccttaaccctacagaaggagattgcaatgcgttatgttcatcctggcaaaccgggcgctttggtttcattcaaatcggcctacggcaacttcatagacggtaaattcgtcgaaccgttaagcggcgaatatttcatgaatacttctcccgtcgatgggagcaacattgcgcagtttccccgttccgacgccaaagatatcgatttggcccttgatgcggcacaccgggcggcggacgcctgggggcgaacctcggtacagcagcgttcccatcttctgctgcaggttgccgaccgcattcaggagaatctggagtatctggcggtagcggagagctgggataacggcaaaccaatccgcgaaaccctgaacgccgacctgccgctggcggtcgatcatttccgctatttcgccggttgtctgcgcgcgcaggaaggcagtaccgccgaaattgacgacaccaccgtggcttatcatttccacgaaccgttgggcgtggtcgggcaaattattccgtggaacttcccgctgctgatggcggcatggaaacttgcgcccgcgctggcggcaggcaactgcgtggtcttaaaaccggcggagcagacgccgctgagtattactttgctgatggaaattatcggcgatctcttcccggcaggggtgttgaacgtggtgcagggctttggcaaagaggccggcgaagcgttggcgacgagcaagcggatcgccaaaattgcctttaccgggtcgacgccggtaggtcgccatattatggcttgcgcggcggagaatattatcccttgtaccgttgagctgggcggcaaatcgccgaatatctattttgccgacgtaatggatggcgaggaggagtttatcgagaaggcggtggaagggctggtactgggcttcttcaatcagggagaagtctgtacctgtccatcgcgcgcattgatccacgaatcgatctacgagccgtttatggagcgggtaatggcgaaagtgatgcagatccgtcgcggcgatccgtttgataccgaaacgatgatcggcgctcaggcgtcacgccagcagttcgataagatcctgtcgtatattaagatcgctcgtgatgaaggcgggcagatcctcaccggcggcgatcgggcgagcattaacgccgagttggatagcggcttctatattcagccgacgctgattaaagggcacaacgagatgcgcagcttccaggaggagatctttggcccggttatcggtgtgaccacctttaaggacgaggctgaggcgctggcgattgcgaaccagacgcagtttggtttaggggccggggtatggacgcgggataccaacctggcgtaccgcatggggcgcggcatcaaggccggacgagtgtggaccaactgctatcacgtttacccggcgcatgccgcgtttggcggctacaagcagtccggcgtcgggcgggaaacccacaagatggcgctggaagcctatcaacagaccaaaaacctgctggtgagctacggcaccgcgccgttggggctgttctgattcatctataacggctgacccgggggcggcgtaaccgccttccccgggctacaggactggcgcccggtctcatcttattgtttgtgctttccagcagcgaacctgcgcgccattcgcttgcgcttccagcggctgcggccgttcgcagccctggctggcgtaaggacatcgttcacgaaagaagcatcccgtcggcaactggcggttgcccggtagttcggtattgcgcacgccttcgcctaatggcgagccgatgcgcggtaccgactccatcaatagccgggtataaggatgcgcgggattatccagtacctgccgcgcctcccccatctcaacgatttgcccgagatacatcaccgccacccgatcgctcatatggcgtatcaccgagacgttatgcgaaatcagcacgtaggtgagattctgccgctgctgcagttcgaccagcagattaaggatctgcgcctgcaccgagatgtccagcgccgaagtcggttcatcgagcacgataatctccggctgcgacgaaagcgcgcgggcgatggcgatacgctggcgctggccgccggaaaaagcgtgcggcagccgatcgagatattcgctacggatccccacctgcagcgccaactgctcggcgagatcgcgacgcgccttttcaggcatgcgcgactggatccacaccggttcggtgatggtgcgccagaccggtagccgtgggtccagcgatgagagcggatcctgaaacaccatttgcatgcgtccgctctggttttcgtcgcgcgccggcgcgcgggtgaagtggccggaagagggctttagcatccccatcagcagcttcgccagggtgcttttcccacagccggattcgccaacgattcctaaagtttcgccgcgcctggccgtcatatccagcccgtttagcgcataaacgcgttcgatgactttgccgcgccagtttttctgcgcggcaaaggtcaggtgcacatcattgagggttaatagcgtttcagacatgggcgttctcccgttgcgggtaccagcaggcagcctgtctatcggcggcgttatcatgagtctgcagcgtgggggtgataccgcaggcttcacctgcggcgaagcagcgttcgcggaaggcgcagccggcgggaagacgcgccagattcggcacggtgccggggatagaacgtagcggcgcgcgcggttcgccattatcgggggcgctgtttaacagaccgatagagtagggatgctggggatgttgcagcacctctgcggtgttgccgctttcaatgaccgcgccggcgtacatgacgtacagccgatcgcacacctgagagaccactgccatatcatggctgataaacagcaccgctgtgccggtcgcctgggccttttgctttaacaggcgcagtacctgacgctgcacggtgacgtccagcgcggtggtcggttcgtcggcaatcagcaggtcgggctcgcaggagaaggcgatagcgatcatcacccgctggcgcatgccgccggaaagttcgaagggatagcgcttgagcacgctttgcggatcggcaatttgcatatccgccagtagttcgacggcgcgggtgcgcgcttcacgcaacgacatgggacggtgctggcgtatgacgtctgccatctgcttaccgatgcgtcgggtggggttaagcgcggtcatcggctcctgaaaaatcatcgcgaccttgctgccgcgaatatcgcgtagcgttttttccgtcaggttgagcatatcgtgacccatcagggtgatagcgccactatgaatgtggtagctgccggcaggcagcaggcgcatcgccagcatcgcggtcaccgatttaccagaacccgactcgcccaccacgccgacgatttcgccgcgatcgatgtgtagcgagatattattcagcacgttgacctggccctgatagaccgggaaactcaggcgaacgttatcgatagttaagacccgattttccattagttgcgccctccggctttgggatccagtagatcctggatgccatcgccaaataggttaaagccgacggcggtgatcaggatcgccgcgccggggaaggcgcagtaccaccactgatcgagcacgtagttgcggccgttagcgaccatcgcgccccattccgcggtgggctgctgggcgccgaggccaataaaaccgagcgtggcggccatcagaatcgcgctgccgatatccagcgaggcctgcaccaccagcggcggcagggcgttacgcagaatatgccagctgatcaaatgccagcgcgaggcgccaaacgtcaccgaggcctcgacgaaagtatgctgacgaaccaccagcgtctggccgcgggccagccgcacgtaaaatggaatacgcacgatggcgatcgccagcatcgcgttgaacaggctcgggcctaacgccgccgccagcgccatggtcagcaccagcgacggaatcgacagcataatgtccatcagacgcataatcagcgcgtcgctgcgcccgcccagtaccccggagagacagcccagcagcgagccgctgatcccggcgatcaataccaccgccagcccggcggccaccgactgttggctgccgatcagtacgcggctgaacagatcgcggccaacctcgtcggtaccaaaccagtgatcgaacgacggcgcctgcagacgcgcggcaaggttgatagcgttaggatcgtgcggcgtcagccacggcgagaagatcattaaaaacagcatgatcagcatgatcgctgcgccaatcagcgttagcgggctctggcggatcaaccaccaacgacgcttccagtggccgcttttttcagcctttggccgtggaagcggttgttcctgagtcatcatcacttagctttctccccgacccatgcgcgggtcgatccataaatagagcaggtcgactaccagattgaccagtacgtaagcaaaggagaccacgatggcgaagcccatcacggcggggaaatcgagcgcctgaatcgaagacaccacgtaagcgcccattccaggccaggcgaaaaccgtttcagtgagcaccgcgccgtacagcagatcgcccagcgccagcccgagcacggtgatggaggggatcagcgcgttgggtagcgcatagcgcaccacaatggtgaatttcggcaagccgcttgccagcgcggtacgaatgtagtcctcattgagctgctcgagcattgccgagcggatctgcctggcgacgatgccaagatgaacgaaggcaagggtggcagccggtagaatgaggtgctgcagggcattgaagaagacttcaatattgccttccagcagtgaatccagcagataaaaaccgctgacgcgggtgggcggatcgaaccagtcatcaagcctgccgctgccgggcagccagtcgagcttgccgtaaaacaagacgattaccccgagaccgagccagaatgccggagtcgagatgccggtcagcgccatcaggcgcaccaggtgatcggtccagcgattgcggtaaaccgccgacagcacgccgagcgggatgccgaccagtagggcaatcagcagcgcgcaaaaggccagctccagcgtcgccgggaagaaggttttcaaatcttccaggaccgggcggccggtgcgaatcgaggtgccgagatcgccgtggagcagggcgtcaacgtagcgggcaaactgctgccagagcggtaaatccagccccagctgctggcgaatatggcggacgatttcatcgctggcgcgatcgcccgccagcagccgcgccgggtcgccgggaatcaggtgcgaaataataaacgtaatcacgcagacgccggcgacgactaatatcagcccccaacagcgctgtcgtattaaaccccagaaactcatgatggcgctcctcggccgggcctgcgacggcccgacccgacaagatggagagacggcccgctacttgtgcatgtcggcgatattgtaaatctgctcaagcatcgggttgaaaacgaagcctttcacctccttgttcatggcgacctgatagttcttctggaacaggtagacgtaggcggcgtcatcaatgacgattttttgcgcctgctgataatctttggtccgcgccgcctgatcggtggtggcaaccgcctgtttcaacaacgcatcaacctgcgggttgtcgtagaacgcgcggtttcccggcagcccttttttgtccgactcgaaccagtagttcataaacatataggggtcggcgaagtccgggctccagttaccgatagcgatgtcgtaatcacctttacccacgcgctcgcgcatggtggcgttggccagtttctccagcttgacctggatacccagcgcctgcaggttggcctgggtggagagcgcaatcggctcccagttaggatcgttatcggagtagaggaacgtcagcgttttcggcttatccgccaccttatccagcgccgctttggctttatcgagatctaatgaatactgcatggcgctggcgtcgtagccccacatgccatcggggatcggtccgcgcatctgcttaccgttaccgccgagaatgccgtcgaccatgcctttatagtccgttgcccacgacaccgcgcggcgcagatccgcctggttcatcggcgctttgctgttgttgagatacagataggtgacgcgcagcgccggatagtcgtagactgtcaccttgtcctctttcttcaatgccgcaaactgatcgaccggcagagcgtcggcgatatccaggtcgcccttggtcaactgcaaacgacgggcggcgctttcgccgatgatttttaccgtgacgcgtttaaaggccggcttattaccgctgaagtgcgggttgggtaccagcaccaactgttggcctttctgccagcgctgcaggctatacgcgccggagcctgcggtgtgctcggccagataggcgcgggcgtcatcggcggcgttggctttcagcaccgccgggttaatgatggaggcgccgtcattggcgagggtatgcaggaacggcgcgaaagattctggcagcgtgaaacgaacggtggccggatcgacgacatccaccttcagcccgctgggaaacgcctccgatggcccctgtttaatgcgcatcaggcgttcgaaagagagtttgaccgcctctgccgtcaccggcgagccgtcggcaaactgcgcgcctttgcgcagggtgaaggtccaggttttgccgtcgtcggaggcctgccagttttcggcaagatccccttcgacatcggttgaacctttgccattatcggttttgtatttgaccagccgctgataggccggataggtcaccgtccagtcgttgttatcgatggtgacggccgggtcgagcgtttgcgggtcggcggctttgccgatcaccagcatatctttcggcaccgcggcaaaagcggaagggatggcggcgcagagcgcggcggctaacagtaatgggcgaaaacctacggatgctgggcgagtcatgttcatggtgaaactccgtcaatctgagcggggagaaacaggcgaaaacatcatcaagtagcggataaccggccgcgcccggtagttcgaaatgccaccattccgtggtaatgcctttaaagccgccgccgaacataatggcgttcagcaacaggcgattacgctgggcctcctgcgccaccgccgggtggtagggatgcgagcgatcgtccatttcgtcaaaggcggtgcccatgtcgagtaggttgttgtggtcatcgagtagcgttacgtcgatggcggtgccgcggctgtggttggaaccgatatcggccggcacgacataatcctggttcgggcaggcattccacagcagctgttgggcgcgctgtggacgataggcgtcaagcaccagcaggcgatagcccgcaagcgcagcgatggcgatggatttctccagcgcgacggccgcgtcggggtgcagcaggcagcgggcttcgcgataaatcggttggccggtaatgttatcggcggtggcgtatttcaggtcgacaggcagcgtgggaaaacgcgcggcgatatccaccagggaaagatggctcatcgaaaatttccttaacgttcaaactgaccaaattcctgctgcagcgcgcggttcgcggcaaggcggctggagaggctcggccccagccgttccaccaccgcggagagcagcagattaaaaaggcaaccgatcggcgccagcgaatcccagaagtggccggtatcggtttttacctgtagtaaatcaaccggatagtcgcgcgcccacggacaccagatatcggtgaccagcgcggtggcaaccccgcgttcgcaggcgacccggcaaaactggcgtgcggcgacggagtaagcgcgggtatcggtcagcaccacataggggcgctggtattcagaattcaatgattccagccaactaccggagctgccgtcggcgtaggtcacgcgcgggcgcaggtattccagatggctgaagaacgtgttggcgatgccgcgggtcgactgaatgccaatgatgataaccgcgtcggcctcggcgatgcgttgactgacgcgggcgaaggtcggttcctgcgccagttgatagacatagcgaatggcatccagctccatctgcaacgacaggctggcgcgatccggctgcgcctgctgctgtgaccaggagtcaagccggtcgatcactccccactggcggtagggcgttgaagcgggctccttcaggcgatgcttcacgtcatcgagattgcgatagcccagcttgcgcagatagcggcctacggttatcccgctggtgccggtggcctgcgcaatgctgtcggcggtctcaaacgggatatgctcccggtggcttaacaaccaactaccaatacgcttttcgctcggcgtgagctggctgaaagtggattcaataatgtgaaacaagccgttgctatcgttcatctctgcccttaatgatagttcgctctcatttaacaaaattctgatactcaattaacaaagcacgatgtgtgccagctattgcgggaaatagtatttccagcaatatcgctaatctattgggaggtgagcggatcctgagcgtaggatttggttattcattgcacaaataaggtgcaatgaatcctggttgtgcatcacaaaataaaaacatttcattaacattttgtgatatggataaagcatggatgctatcaataggaggtgtgctggctgggtgacgacattacgctggacaggaaagggtgaaaaatgaaaatcgcatttggcgaaataagatcgttattacaaagtcagcgtattttcctcggcgggcagaggctggtttgcgaccatccgttttatcgtgatgagcaaccaattgaagtaccagaaaatttatgcactgaaccgtataccacctattggggcgctgtggcgagcggttggcttcgctggggctttcagttacacccgtacgttgttgccggcgtttattcaggttgggcgctacacctcaatcgctgatagattacaggtattaggcgatcgtcatcccttagagtgggcaagctccagcccggttttttacgcccgtcattcagcgctaatggcaaccctggcagcggataacggacgggaaaaccatttttacgcttttgaaaaacagacgcgccccatcgtgattggcaatgatgtctggattggacaaaacgtgacgttggcgcaggggattaccattggcgatggcgcggttatcgccgccaacgcgctggtggtgaaagatgttgccccgtataccatagttggcgggaacccggcgaagctcatcaaatatcgttttgccgaaccgattgttgagcagctgttagcgctgcgctggtggcaatattctgcacaggatattgctatgtttccggtgaacgaggtggcgcgcttttgtgaattactgcgtcatgcgcaggagcaaggtgaactcacgccgcttgcgctaccaaagctgacggcaacggtggtgaaaaccgtagtctctggcggcatgaagatgaaatcataaggaatttaagatgaagttaaagttgggtgtggccctgatggcggcggtgatagcctgcggcgtccaggcgcgcgatatgcagtcgattcaacaaagcggcgagttaaaagtcggcgtgccgggggactacgcgccgttggcctttcataacggcgccggcgaacttatcggctatgacgtcgatatggcgcacgatctgggtaaaacgctgggagtgaaggtgacgtttattatcaccagttggccaacgttatcgactgatttaaaagccgataagtttgatatcgctatgggaggcgtaacggagacggcggcacgggcaaaagatttctccctgagccatccggtggtggccaatggcaaaatcgccctggcgaactgcagcgccgcgccagcgctcggcagccttgaaaaaatcgaccagccgaatgtgaaggtgattgtgaaccccggcggtaccaaccaaagtttcgttgatgagcatatcaagcatgcgcagatcatccgcgtgcagaacaatgtcgataatctgcaggcgctgcggcaaaaaacggccgatatgatggtgaccgacctgatagaaggggattactaccagagcaaggagcccggcgtgttctgcgtggcgaatgagacgccgttccccggcaccgccagctataaggtctatatgatgaataaggataatccggcgctgcttgagaaagtgaaccactggctggacagccaggacaaaaatgtgctcaagagaaagtggaaaattcaggggtaattcatgattcgcgctgccgccagaatgcgacattctggcggcgcagtggattagcttttctgccgcgcctgatagcggaagtagcagtagtaaccaatcgaggcggtcagacaaagcatgtagccgaatgattcactaccctcttcaacggtgtttttcaccacccgcgcgtagttttcatcgagtacggcataccataagccatgcatgccgaacagtcgtgagaagaccagaatcgccagcaggccgcttatcatcatgccgtagtaaggcgtgcgggtgtattgcgccagttgtgacagcgtttgacgagcgtggcgcagcggagcgattagcgcggctatcgtcgctgccagcgcgaaccacacccagctaccgtgagtaattagatcaaatagcgcatccagttcgcggatcagcatcgccaggaagaagccgccaacgaggatattacagtagcgcaggagctcatattttttcgccagcaggaagtgaatcagcacgattatcgccagcacgccctcctgcactacctcggtaagcgaaatctccgggatatcgttgccaaacacccggatatccatccatatacaaagtaccgcgatggcggaagctgccgctgcgccgagaaagaaaagtaagcttctgatgacagacattaacaccactatttatgttcaaaacagcaatgataagtatcgtgaatgtggcttcctgttcactttgtgcgacatcgcggcgtgttttaaaccttttgagctatttagctcgcaatggtggctacagatgagaaaggggagctctgctccccgatggctgggacaattcagacaatatcatcgaccacgccgccatcgacccgcagcgcggcgccggaggtggcagatgcctgcggtgaacagacgtagaccaccatattggccacctcatctaccgaggccgcgcgctgaataaccgaagcggggcgttgcgccatgacaaactctttcgccagttgttccagcggcttgccggttcgcgtgacctcatctttcatcatttcggcaaaaccgtcagaaagggttgggccgggtagcacgctgtttacggtgacgccgctgccggcgacgtatttcgccagcccgcgcgccagcgacagctgcgcggttttggtcacgccgtagtgaatcatgtccgcgggaatattgcgtgccgattcggaggagataaagaccacccgaccccagcctttacgcaccatggcgggcaacagcgcgcgtgacaagcgaacgccggacatcacgttggtttgccaatagttttcccaggtggcgtcatcggtggcgtaaaaatcctgcgggccgtaaataccggcgttattcaccaggatatcgacttcattcaccgcctgcagcagttggctgacgcccgcggcgtcactgagatcggccactgcgggatagggcctgaatcccggcacttcctgttgcagccgcgccatcgccgcattaacgctatgttcgctgcggccgttgataatcacttccgcaccgcttgccgccagccccttcgcaatggcgtaaccaataccggccgtggacgccgtcaccagtgcgactttccccgataaatcaatattcatggttgagccttttttatggaatggagtagtaagcgtagcaggtgggaattgggggcatcggccagcggcaatcaacaatatcgatggcgatatcgaaattatccgttagagcatagctgtgagtgcctctcataatgggggctgtctttggcgatttctctataactgatgagtaaacgatgaatacgacctttcccagtaaagtcctcggtgatatgcgcgttactgccgtaagcgatggttatttgcaggtagattttggtctgttaactaaaattgatgaagatgggtgcagaaacatccaggctaacgcccgtatagcacaaccgaatgcggtcaacataaacacctttctggtacaacaagccgggatgaatatcctgatcgatagcggcgctggcggcgttaagggtggggaggccaactgatcaataatctggctacacttggcgtcaaaccagaggatattgacgctgtactgttgacccatgcgcatcccgatcacatcggtggcttaattaattcgcagcaagttgcggtatttcctcgtgctgaattgataatacctcaagatgaattcagttatctcgaaggtgaccatcatttggctacggccagtgaacgcgttaaaggtaatgttatgttcgctcgccgcgtgtttaaacaatatcagtaccgtttacggctgattgatgaaggcgaggtatttgctggtatcagtgccctggcattaaaaggacatacgccaggtcatacggggtatctcctctctggaggcatagaacgcgtattagtgtgggggatattgtgcattttccccatattcagttattagacccgaggtcacgatagccttcgacttcgacccgcttttggcgcaggagacgcgcattcgccttcttgaaaaggtctgcgctgaacagatactggttgccgggatgcattttgatacagctggtttcgccaggattaaaaatgctcgtccggctatcaaattatcccggcggacggaattaatagccagtctcacgcagccgtggatcctgaaatacggatgccaccatgaggttcaactgctgcaaatcgaaatgggcgccctcagggcggcagagcagctcaattccgaaatcattaaactcacctgttaatggatgaatttttattttgcgctggatctcatcgctgattgagcaatgcagcaccagcgataccctttgccatcggcgatatttgagaacagcaccgggtaagagccgcactccacgacgcgcctgggagtaatgttgccttcacggaataacatatccagattgcgcgttgaagttgcgcattttttactactcaataaaagacattgtcatccagggcggaggtcgcggtgatggctggatgatctttcgcggtgataatcactaactcactagtgagcaacatagcgcgcgtatgctgtggggaggagaagcccgcgccaataatgaccgcatcatattcgtgtctatcgaaagcattaagtaaactgctggtattgccgattgaaacatcaatatcccagcctaagtcatggcctgaatcaatcaatgcgctgataacatagggcggcaaacattcaatgatgccgattttaatcgttaatcggcgtttttttgaaagggtaatgttgtgtttgcaatcatccgccaggttaagcattttgagggcatattcatacaatatctttccctgctcggttgggatacaccctcgttcttcctgtctaatagcgtggcatccaggctactttccaggctgcgtatccgatgggaaatactggattgcactcgattcagacgttctgccgccagggtgatattccccgtttccacaacagtaacgaacgccagaagttcattaagcttcatcttaaaccttatatgagcgttattttctaaccgccagcatatttataaattttggtgactactttgtcatcagatttttaattattgacgaaaatggcgatgattatctcggtgacgaacggccatcgattttttcgctaataatctcgattttattctctggtttttccctctggcgacattcataacaataaaaccatttgatctgttttgataaggacctgcggatatgtcgctggtaagtagttgttcacttgagcaaggttttgaggcgccgaggcgctatttagccgccgcggccatattaattggcgtgctaatggcggcgctggatagttccattgtcaatatcgcattgcccaccattgccagtgccttacaggtcgattcggcgtccggtatctggatcaccaacggctatcaggtagccagcgcggcgacgatgctgatttgcgcgtcgctgggcagcagaatcggtgagaagcgtttttacacggcgggaatggtgttatttacgctctcttcgctgggctgtagccttgcgccgacctttggcgtactggttaccatgcggatactgcaaggggtaagctatgcggtcatgataagcgtggggctgggcctgtaccgggttattttcccaccccgcgcgctaggaacgattttcgggctgaatgcgctagccttcgcggtgggcacggctatcggtccggcgctgggcggatttatcatctcgtcgctctcctggccgtggcttttctatatcaatatcctgcctggcggcgctgctattgttttctccttgatttcattaggggaggataacgaaaaggagcagggctttgattgggccggggccgtgagttcagcggcggcattgggcttgatggtggtggcggtcgatcaaattggccgctgggagagcctgacgcttatctattgcgcggcggcgtcagtggcgttatttgctttctttattatcgtccagacgcgagcaaagcaccccttattgccgcttgatatatttcgttcacggcaatatagctttgcggtgctttcatccgtctctatgttcgtggcccagggaatggcattggtcggtttaccgtttgtattgcaacatacctaccattactcagtactggaatcggtttttatctttacgccgtggccggtggctgtcgccttctgcgccccggtagcgggaagactgtcaaaccgttttaatccgacgcagatttcaactgtcggggtggttatcttttgtcttggcttaggctcgctggcactgttgccgggcgctgcgacggtgaatgattttctgtggcggaccgccgtttgcggggtggggtatggcttattcctgccgccaaacaacaaggagatgtttgccaatgtctcagcaaatcgcacggtaacggcctccggcgtgctatcaacggccaggacgactgggctgtccatcggtgcggcgctggtggcgatggtcgttgcgctgttaaacggcttaaccggcccaggcggcgcacagtttgccgtttatgtgtttggcttcgcctgcgctattgcggcaatatcctctattgccagcaccttacgcttgcatcgctaaagaaaggaatgccggtagtggtgaaaatgcaactgctactggcacgttcgattatgtgtttttagcatttttacccgcttagctccggtataaaatttttaatacattcagcaaaacagattgttttctttcgttataataaggcacttgaatgcgctgacgcccggactggacctgctttctgatgctggaaataaaaaatatcgcctgcctgcgggatgaacgaaccctttttacccacctatcgtttgcggtacagcccggcgagattattcaaatttcaggcccaacggcgcgggtaaaacctcgttattacatctcttaaccgggttatcgacgccagaagaaggggaaattttctggcagggcaaaccgctgcggcgtactcgcgatagctggcacgcgcagctcttatggctcggtcatcaggtgggggttaaaggggcgctaacggcggacgaaaatctgcgcttttatcatcccgaggcgaccattgaggcgcgctggcaggcgctggcgcaggttgagctggtgggctttgaagatgttccggtagcgcaactctccgccgggcaacagcggcgcgtcgcgctggcgaggctttggctcagccgcgcgacgttctggattttagatgaacccttcaccgcgctcgatgcggctggcgtgcaaacgctgaccacccggctggagcagcacgtcggccaaggcggtgcggtcatcctgaccacccatcaacctctgcgccctctgtgcgttcccttacgcacgattatgctgagtgacgatgaggcggtcgaggcatgatcaagcagatattctggcgcgacctgcgcctcgcttttcgcaattacgccgaaattatcaacccgctgtggtttttcctgattattatcaccttgttcccctcagtatcggccctgaaccgcagctgctccggcagattgcgccgggcattgtgtgggtggctgcgctcctctcttcgctgctggcaatggaccggctgtttcgcgatgactggctggatggctcgctgcagcaaatgatgctgatgccggtgccgctgtcgctggtggtgctggcaaagatcgcggcgcattgggtggtctccgggctgccgctgctgataatctctccgctgatcgccatgttatttggactttcgacggcggagtggcaggtgctggccctgacgctattgatgggcacgccaacgctgagctttattggcgccatcggcgtggggctgactgtcggtctgcggcgcggcggcgtattgctgagcctgctggtgctgccgctgatgattccgttactgattttcgccaccgccgccgtgggagcggcgcagatgcagttaccggttgacggctatatggccatccttggcgcttttctggcgggaagcgccaccttaagtccgtttgctaccgcggcggcactaagaattagcgtgcaataattcccgttccctcggggcaatgaggcaaaaaaaatgtggaaagtgttacatcaactcgccattccagagcgcctgtatagcgtatgcggacgatgcattccgctgatggctatcctcagcgcgctgtttctggtggtgggctgcgtctgggatttgtctacgccccggcagattatcaacagggtgaaagctatcgcatcatgtatctgcacgtcccggcggcgatgtggtcgatggggatttacggctcaatggccgtcaccgcttttgtcggcctggtctggcagatgaaaatggcggataaagcggtgatggcgatggcgctgccaggcgcggtttacacctttattgcgctggtgaccggttccgcgtggggaaaaccgatgtggggaacctggtgggtgtgggatgcgcgtctgacatccgaactggtcctgctgtttttatacgtcggggtgattggcctgtatcacgcttttgacgatcgccggctggccgggcgcgccgccgggatactggtgctggtcggggtggtcaacctgccgattattcattattccgttgagtggtggaataccctgcatcagggctcgaccaatatgcagaaaaccatcgacccgtcgatgcgcatgccgttgcgtttaaccattttcggtttcttattcctctttattactctgacattaatgcgtatgcgtaatttaattctgttgcaggagcgccgccgcccgtgggtcgtggcgctggctggcgctagtaagcgcgaggagaactcatgaccagcgcttttcactcctggagcgatttctggcagatgggcggctatgccttttatgtctggctggcggttgcagtgacggtcatcgcgctgctgattttgttcatccatacccgctggcagcgccgggcgctactggcggatatacgccggcagatggcgcgcgagcggcgggtatcggcggcgcgtaagcaaagcactatgaagggagatgcgttgtgaatcctcggcgtaaagtacgtctctggctcgcctgcggagtgattggggggctggcgctgaccgttggtctggtgatgtatgcattaagctccaatatcgatctcttctataccccaggcgaagtgatatacggcaaacgggaaaatggccagaagccagagccggggcagcgtctacgtatcggcggcatggtgatgcccggcagcgtgaagcgtgacgataaaaccctcgatgtgaccttcaaactctatgatgcccgcggcgtcgtcgaggtgagctataccgggatcctgccggcgttgttccgcgaagggcagggggtcgtagcccaagggacgctgcaggacgggacgcatatccgcgcgaaagaagtgctggcgaaacacgatgaaaattacacccctccggaagtgaaagaagcgatggaagagaatcatcatccggctgaaaagccacagggagccgcgcaatgatccccgaaatcggcctcttcctgctgtgcctggcgctgggcatttcctgcctgctggcgctatttccctcctggggcgcgatgcggcaggatgcgcggatgatggcgctggcgaagccgctgtcggtagcgatgtttgccgccatcctcggggcgtttctcattctggtgtatgcctttgtggtgaatgacttcaccgttctgtatgtcgtcagtaactcgaatacgctgctgccggtgtggtatcgcgtagcggcgacctgggggcccacgagggatcgttgctgctgtgggtattgctgatgagcggctggacctgtgcggtcgcggccctgagccgtaatattccgctggaagcctcttcgcgggtgctggcggtaatggggatgatatccttctgcttcctggcgtttatcctgctgacctcaaatccgttcgtgcgcacgctacctgatttccccatcgaagggcgcgatctgaacccgatgctgcaggatatcgggctgatcttccacccgccgatgctgtacatgggctatgtgggcttctccgtggccttcgctttcgccattgcgtcgctgatgaccgggcgtcttgatagcgcgtgggcgcgctggtcgcgcccgtggacgctggcggcgtggagctttctgacggtcggtatcgtgctggggtcggcgtgggcctattatgagctcggctggggcggctggtggttctgggatccggtagaaaacgcctccctgatgccgtggctggcgggaacggcgctgattcactcgctttcggtcaccgaaaagcgcggcagctttaaatcctggaccgtgctgctggcgattctggcgttctcgctgtgcctgctgggcactttcctggtgcgttccggggtactgatttccgtacactccttcgcttccgatcccacgcgcggcatgtttattctggcgctgctggtgatcactatcggcggttctttgctgttattcgccatcaaaggcggcaaagtccgttcccgggtgcgtcacgaactgtggtcgcgcgagtcgctgctgctgggcaacaatgtgctgctgattgccgccatgctggtggtgctgctggggacgttgctgccgctgatacacaagctactggggttaggcagcatttctattggcgagccgttctttaattccctctttattgcgctgatgattccgttctcgctgctccttggtatcgggccgctggtgcgctggcgtcgcgatgaattccacaagctgcgtaagcggctgctgattgccgcggtggttgccatcgtactggccatcgcactgccgtggctgatgcaggatcgtattaaagccatgaccgtagttggcctgctgatgtcgctgtgggcattcgtgcttaccgtgatggaagtggtggagcgcgccaccgatcgccactccttctggcgcgggctgacccgcctcggacgcagccactggggaatggtcgccggccatgtggggctggtggtcaccgtcattggcatcgccttcagtcagaattacagcatcgagcgcgatgtgcgaatgaagccgggtgatagcgtcgatatccaccagtatcactttgtgttccgtgacgtgcgggatatcaccgggccgaactactttggcggtgaaggggtgctcgaagtatcacagaatggccgtcacgtgagtacgctgcgggcggagaaacgcatttacagcagcagccggatggagatgaccgaagccgccatcgacggtgggctggtgcgcgacctgtacgctgcgctgggtgaagagctggccgacggtagctgggcggtgcgcttgtactataaaccttttgttcgctggatctggttcggcgggatgttaatggcgtttggcggcgtgctgtgcatcctggacccacgttatcgcttacgtaaatcactgccggagaacgcgtgatgaaccgcaaagtcttatatttaccgctggctatcttcctgattctggcggcggcgctgatgtggcaactgatgcgcaatagcgacggggacgatcctaccgtgcttgaatctgcgttggtgggtaagcctctgccggatttccgcctggcgtcgctggaaaaaccggatgtcatgctggatccctctaacattatcaatggtaaaccggtgctgattaacgtctgggccacctggtgccccacctgtcgggcggagcatcagtatttgcgctccctggcggcgcagggcattcgcatcgttggcatcaactataaagacgatcgccagaaagcggtgaactggctgcatgaattgggcaacccgtatgcgctgggagtgtttgacggcgacggcatgctggggctggatcttggggtgtatggcgcgccggaaactttcctcatcgacggcaaaggcattatccgctaccgccatgccggcgatgtgaacgagcgggtctggcagcaggagattttgccgctgtggaataaatacagccagcagggggcgcgtgaaatatctgctcatcactttactgacggcgctgctctcgtttcaggcgctggcggcgattgatacctatccatttaaagatgaggcccaggagcagcagttccgccagttgaccgaacagctgcgctgcccgaaatgccagaacaacagtattgccgattcgaactcgatgattgccgccgatatgcgtaaaaaggtttggcaattgatggagcaggggcaaagcaatcagcaaatcaccgattacatggtggcgcgctacggcaacttcgtgacctacgaaccgccggtgacccccgcgacgattatcctctggctgctgccggcttgctttgttgtgggcggcgcgctggtgattttccgtttaagccgtcgctcacgggctgaacgcatcagcgagctgagcgcgcaggaacaggaacgcttaaaggcgctgcttgatgacaataaaaggaccctgaaatgattgtcgctttgctcatcatgttggtgttactgctgggagccgcggcgctgctgtttattccatggagcggcaggcagcgcgttgaccgcaataccatgaaccatatgatttatcgggcgcgcctgcaggagcttgatgaggatctttcagcggtgaacgcggcgcagcaacagcagctggttgacgatttacgcttgaatttattggaagatttgcccgaatctgccgaaacgaatcacaaaaatagtagttattgggtgtatattcttggggttattatactaacctctttatgcgtaggggtttttatccgaacgagttacatgacccgcgtggttgagtggcagcaagttgtccagcaaacgccgcagttgatgcagcgggtgatggatccacagggtaaaccgttgtcggaagaagagctgtttcgactggcgctggggctacgcacccgcctgcagcaatacccggccgaccagctgagctggacgatgctcggcaggctgcaactggtgctcaataatccaggcgccgcgttacaggcgtttgataaggcgcgacagctggcgccaggcaacgccgatgcgcaactgggatataccgaagcgttacttcactctacggatcccaacgatagccgtgaagcccagcaactgctcgatacgttgctgaagaataaccataacgatgtacgggtgcttagcctggcggcgtttaacgcctttgagcaccagcagtatgacaaagcgatcgcggcgtggcagctgatgctgcaactgttaccggcggatgatgctcaacgagaaattatcattcgtagtattgaccgggcgaaaaaagaacaagccgctacactgcaataattaaaataacgtgagtattgctcgaaggcatattggatttgcaatgggttatcgctctgaaatcacaggataatcatccccggttgattatcctggctccgaaaatttccaaaaatttagttggattagaaggtgagtgcgatcgttatagatttatttatataacgattgccatctggcagggacttttgcgtctttcatttaggaaaagggttaaataataagatgagtaaactttcactggaacgctctggtaggcgaaaaattatatttatcgccttgctggttgggatcattattggcgtggtattgctggctggtaccgcgactattatgcataaaaccagcgataccgaattttgtgtgtcatgtcataccatgcagcagcctctggcggaatatcagggcagcgtgcatttccagaacgataaaggtattcgcgccgagtgcgccgattgccacgttcctcatcagccgatcgattatatgctgaccaaaattggcgccctgaaagatgtctggggtgaaatgaccggcaaaatcgacactccggaaaaatacgaggcgcataaactggcgatggcccagagcgtctgggatgggttgaagaagagcgattcggcgacctgccgttcctgccacgactataaagcgatggatattctggcgcaaacccctgaagcccgtaagcagcacccggtggcgatcaaagagggcgaaacctgcatcgattgccataaaggcgtggcgcatattctgccgaacatgagcggcctggcggcggcaggggccagcgagctcgctaacgcggcggcgaaaaccccggcgaccgcaaccaccctttacaccattcagacccagccgttctggctgagcgagaaagcaggcgaccataacgacggtaacctgatggcctccactgaagtgaaagtggtgaagcgtgaaggcgacatggtgctggcggatgttcatggctggcaacaggatggcgtcaccgaagccttctacgccgcgcgcggcaaacgcatcatgagcgcgctgctgggcgaagaggctcgcaaagcgttaaaagtctctggctccgttaccgatgaagaaaccaaacaggtctggcatgaagtcgatctgcaggtctggctgccggcgaaaaatctgattggcgatcaacaaaaaatctggagttacgcttctgaattaatggctaacaactgtaccggctgtcatggcctgaccgagttgaatcgctttaacgccaaccagtggattggggtggttaaaggtatgtccggccgtacttcactgactcaggaacaggttcgtctcctgacccagtacgtacaaaaacatgcgagcgacatgccagcagcggccaatcaggacaaacaataaggagccatgatgaaaaagaataacgattatgacatggcggatcagagccaggaacccggtatgaatctgacgcgtcgccgttttctggctggcgccagcgccctgatggcgacgccgctgctggcggggctgtggccgcgttcggcgctggcggaggccattagccaggcgatgccgcagtttatcgcattgcgccaggcggaaagcggtatcctcaccggcgcccactggggcgcgtttgaagccatcgtccgcgacggcaaaatggttgacgttcgcccgatcaaagacgatccgtatcccaacgaactgattaccatggcgccgtatcaggttcacgccgaaaaccggattaaatatccgatggtgcgtaaaagctggttagaaggcggggcgaaaaacggtaagccggagctgcgcggccgcgatgagtgggtccgcgtcagctgggataaagccctgcatctggtggcgggtgaaatcagccgtctgcaaaaagagcatggcccatcatctatttatgccggttcttacggctggaaaagcatcgggatgttccacaacccgagaacgctgctgcagcgcatgatgaacctggcgggcggcttcgtcggctattccggtgactactccaccggcgcagcgcaggtgattatgccgcacgttgtcggctctgttgaggtttacgaacagcagaccgcgtggccaaatgtgattgataacagcgagctggtggtgatgatcggttgtaaccccatgatcacgctgaaaaacagctggaacctgccggatcacgtcggccagacgggctttgaagcgctgaagaaaaagggcacccggatgatctgtatcgacccggtgcgcagcgacagcgcgcgtgaattaggcgccgagtggatcgccccgcgcagctacaccgactgcgcgctgatggcgggggtagcccatacgctgctggcagaaaatctgcataacccagatttcctgaaaacctacaccgtagggttcgataaatttgaagcctacctgaacggtgaagaagatggcgtcgtcaaggatgccaactgggctgcggatatcagcggcgttgatgctgagactatcaagcagctggcgcgagatatggcgaagcatcgcaccatgatcatgggcggctggggcattcagcgtcagcatcatggcgaacaggcccactggatgatggtgacgctggcggcgatgctggggcagattggcctgcccggcggtggtttcggctttagctatcactactcttccggcggtagcccaaccgcgcgcggcggtattctggcggggatctccgccggtagcccaacgtcgccggcggcgaaagatattacgccgttcccggtggcgcgcatcgccgatgcgctggcgaacccaggcaagaccatcgactataacgggacaaaggttacctatccggatattaaaatggtgtacgtggcgggcggtaacaccttccaccagcatcaggataccaacaacctggtgaaagcctggcagcatccggaaaccgtggtggtgaacgaaccgtactggacggcgacggcgaaacacgcggacatcgtactgccggtgaccaccacctacgagcgcaacgacatggacatgggcggagactattcgcagctttatgtcttcccgctgcgccagtgcgtaccgccgcagaacgaagcgaaaaacgactttgatgtctttgcggggatttccgagatccttggggtgcacgaggcctttaccgaaggcaaagatgagatgctgtggttgaagggcatgtatgacgagatgaaagcccaggcgcgcaacgcccgcgtagcgctgccgccgtttgatatgttctgggcttccaacaactacattcgcttcccgatcccgcaagagaacacacagtgggtgcgtttcgccgatttccgcgagaacccgctgctcaacccgctgggaacgccgtcagggaaaatcgagatctactctgacgccatcgccaaaatgggctacgaggactgtaaagcgattccaacctggatgccgccgcacgagtggtatcgcgggccggaagccgagaaatatccgctgtcgctcaataccggtcacccgattaaccgtctgcactctcagcttgataatacgccgctgcgcaagaaatacgcggtagccgatcgcgaagccatctggatccatccgaaagatgcgagcgcgcgcggcatcagcgaaggcgatctggttcgcgcctttaacgatcgcgggcagatccttgtcggagcggtgattaccgataacgttcgcgaaggtgtggtgcgcatcagtgaaggggcatggtttgatccggccgatccgtcacagccgggatcgctgtgtaaaaacggtaacgtcaactgtctgacctttgacgtgggctcctccagcctggcgcaggggaactgtggccagatgtcgcagctgcagatcgagaagtacaccggaccggcgctgaaaaacaccgcgcacgatgtgccggtaggcgcgtaacccgcagctgacgtttgaaagacaaaacggacacttctttgagggagtgtccgtttatcaggtgaaagtgaatatattcacggcatcgctaattccacaatgtcttatttcctgtactgcatgagcctggcttttgggtgtatacctaaacgtatgccaattgcctcgcttaaaactctttcaggagcacttacccagctcatcggaaagcttgttgagttcatcctgaatgtgtttacgtcgctgtttcagcagtaagcgggttggaatgatgcgctcgataattgtcggcttcttatatacatactctgtaacgagctgtttaatatcttcctctgaccaaccgtccatcaccggcgttgggttgtagagaagatttgactggagggcaggggcaacctcctcatccagaatcacaaagatctcttcccgacttaaaccagactcctttaacttctgcgccatccatcggtagtcgtagtcctggagttcgcgtccggtaaacagctccgataatgcgtgccagacaggaacgcgggtcatcagttgagcttctgttagttgcatattagtttctcccctgtggtgaaacatataaggttccaaacagaaggtctgttccgaccgatgcgagaattccgcccactaatgccgcaacaccaatacaaacaggcgcagttgccgcacaaacacctgttgcgaccactgcagctccgactccccatcctccggcaacaccagcagcggctatagcaccttgatgcatcgtttcggtggttttatcttccgcttgatagatttcgtaagcggcgacagctaaagagacaaagaggacacgcttaccggccatacccaaggttttagcgatgcccgatactgcgcccctgtcacgtccagccgagtggatcatttctttaaagattgtggcctgctgtctttccgatagagactcgaaaggttgctgaaacatcttcgtagcataatgttcagttaggtcagccatcgtacgccccgatggttttaactttttcgcgtaggctctaccgacagggctgtttcttagccgtgaaagatccagaatttcgttgcgcatctgagaggctaatctggcggcttctctgggagacattttcccacttccaactgattgaacaaactcggcggacatgttttgaatatcacgtagatattgcactctaacacgggagtcctgaatacaatgcgcggcaaagtttgatgccgttccttgcagcgaggccagagcagcagaaaaggctctctgatcattctgcagtgctccagcgacagcagggtatgtgaatcccattcagcacctcatcattactaatagataggttcctaatgatacttatggtctgtttttttgctaagtgaactctacatgatttctgaaacgaaaccggcaattcggagttcccttagttactggaactaagctccagctgtgttttgaatagagcttaaaattcttttttgttttacgggtcatactgttcaataagttatttttattaaaatattaagtacatagcaagtgaagtgcgaagagttatcacttcacaatgcgtatctgacactacagtgtatgtcagataccggaataaacgattgccagaagtagcgccagactcataggacaatatttctcgtcgggataacctgctgcggacatcactgttcctgcaaaaatatctggcctgaatataaacaactcgatattctgaaatgctttgtattttttgtgaacaggaaaaagtatgctgagtacattacccgatttacacagaagttttgcagagcaactcaaacttaaatttcagtctgattcgcgaattcactcccttctcgctggtggctcaattgttcatggtgggtttgataaatactccgatctcgattttgtcgttgtcgtagacactctccactatgacgaaatcatgacgcagcgcagggagcttgccggaacattaggccatctgctccatgcttttaccggggaacatgtcggagagcctcgcctgctaatatgcctgtatggcccagaacttcttcatgtcgatctgaaattcgtcactctggaaatgctcactcaacgcgttgaggagccagcagtgttatttacccgtgataacactgctttgcagcgacagctggcaaaatttagtgctcactggcctgacatgacgccggagtggtttgagtcccgagcctggatctggctgcattatgcagtggttaagttgggaaggggcgaactcttcgaagcgattggtatgctgtcattcttccgcgagcaggtgctggggccaatgctgtaccgtcgtgccaatcttccgcaacgtggggttcgccgcattgaattccacggcattgatcctgatggcctgctgacttccacgctggcaacgcacgatcgtgactccgtcagcatggctatcagaatggctgttgacgcttatatcaatctgcgagctgatgctctgcctgagaatatcgcagatgatgcggctcgtcgggcggttcttgcgatgcttaaagcgtattctgacagggtttaaatctttactccggtcgcttacacggccggagtaaaagtaccagcgatctaaatcccaggattggctgtcgcagttagttactacaatcccatgctaaagccaggttcaggtgtcaagagtaaggtccgctatctaaaaaacgtgacctgcctggatgggatacttacgccatcaccaccatcatagagaacgtagcccgcttctttggatttggcagattcgatttctttaacagagagaggtttggtttgtcttggcattgccgggtttccatagttttaggcacctcaaaaacaataaagctttatgaggtgcctaacaaggtgcctaaaaggttcggatttaattagttcagttcggacttcgcgggacaaattgagggcacaaaaaagcccgcagggcttgcgccgtgcgggctcttaggacttcatcggatgactctggtaatcaccgatggagaattttggtggagctggcgggagttgaacccgcgtccgaaattcctacatactaatacaaagttaacaaaaacaatatattgcatttaaaaacaataacatagtgtttataggttttatattattttaggcatttttattgctctgccgccaaagtgtcgccatttttttggtaatgttgtcctcttaaaattaatctaggagaagttgtgtcattactttgttgtcgctgaaaacctgcattaatttcatgaaactcattaattttcccccaataggaaagtagtttcttagttttagtaaagatatgtgtttctaccatagtatattggtttgctgcgtcaattatccctactgatatatcctcaatagcctcaagtaatttatacatttctttaaaagaagaaatcgacgtgaataacaaggaatcattatattttatagtaaatgtttttgtataggttggatataatatttcaagagcatcacataaaattataatttcaatctcaaggttgtaccatatttttaataactcactaaaatcttctgtttcattatttttggcatgcgtgatttcattcttggttttatgaaaggtgctaagaaggtaattaatcttcatccaagatttcaatattgtagatgtgtagtttttatctgtttcatattctacgccattaatagggttgcatttcggatatagctttttgtatagggaaagggggtaggttattttaatgaacttagattcggtagttaattttccaatttcaagcaatatcttggccgttaactccttttcaggtaaggatttaaagtaatcagtttggaatttaacatgtgcataatacccatcagttttattttttctttcagactcagtaatctgtttttcagtttggattgttcggtggaggttgtttataattgaagcaaagggaactgcagaggccaatattaataatggtaattttgatatctcaaggaatcgactgtaaccatggcttgtaaggctgaatgaatgccatttgtctacccagattaaggccccaaaaaacaaacatgttactaaaggaatgccaattgaagcccagaaaataggttgttttaaaagactttggtgatcgagtctgtagtgtcgccgttttataaaaataaaaattaaagttattagtaaaaaaaagtatgcgaggctaataatgatttttgtttccattttaaatttccaaagtagctaatggatttttagtaacagcatcttctaggtgttcaggagaaaagtgagaataaatcatcgtcatttttatatcggcatgacccagaatatcccgtaagacgaggatgtttccgccgttcatcataaaatgactagcgaaagtatgacgtaacacgtgtgtacattgcccttctggcaagtcgatgccagcacgtttcactgctcgctcaaaagctttcctgcaaggcgtgaataactggcctctttttttagggagttcatcatatagttcctgggatatcggtactgtccggtttttcttgcctttagtttttgtgtaagtaattctgtattttgatagctgatgaccctgcagattttctgcttcactccaccgcgcgccggttgccaggcaaattttcgtgatcatcaacaagctggggctttgcgagtcagcgcaggcatcaagcaagcgtttaatttcgtccggggccaggaacgctaattctccctctgcgattttgaacgttggtagccctgcgagtgggttaggagcagaccagtggcctagctttttcagagtgccaaaaaccgatgataggttgcgctgttcgaggtttaccgttcggggcttaactggtgacataaacgtgccatcttcatttcgtacttcaccttttagccgcgcttcccggtattttgtgaaatcggctgccgttaactctgaagcaaccggattgcccagaccattacaaataatgttgagtttcgccattaggcgtttcgggtccgctagcgtctgaccgtagagtgagtgccattgctcaattaattctgacaagcgccgccgatcttccttctcaccaagccatggttttttgttcacttcatccatagtgaagttttcgaatgctacggcctcacctttcgtcgcaaattgcttgcgcacgcgcttaccgtcacgcccgttcgggtagcattcacacaaccattttccgtttggctgctttctgattgtcatatcaaaggctcttaattatttttaaagcgcgtcctactacctctatatcatcaagactgcactcaaaggatgattcgtcttgatggaccactaatctgttccctggtagccgtgttaacttaacaatgctttttattccgtcgatatctaccaaccacataccgttaactggagtagtttggctgcggtccactaagtaagaatccccagaagtattcaccagcaataagttgcttgagtctgaggggagcaggctgctatcaatgattgcttttccagcatcgaccaataagccaccgttgagagttgccttatcaatttcggggctgacaagctcagaaaggtgtttaactttgccagtgttcccgaaattgatatcttttttatggtcaatatttgaacctgcctcaccctgtccggtagtgagccacagcaaagaaacccctgtctccaaagcacactgaatcacccactccgcagggaagctatctcttaagtacctgtttgccatggtactttttgatgcgcctagatgatcgcacagctgttgtctggatttgaaatcataggcagccattagcctatggatagcttctctcccccggtattctcaccagctttcacctgtatcattttttaaccctgttgacgtatcaaatattggatcgtagtatctggatgtatcaattattgaatcaaataaaacaagataaaacgacgtaaaccaaaccttaaccgagagatattgcactatgagcactgatatttcaattcgtgtaccaaaagagatagctacgcctgcagagttcgcggaatgggagggtatctcccgtggctctgtttaccagaaaattcaccatggacagcttgccaagtacatggtcaagaaggaaaaaaacaaaggacgagtaagcttgcgttacctgatgtacaaagctgatcaggttcgtgagtcccttggtcattctaacttccgcatcattgtgggccagtaagttcaattatgagaacttttgaaggggctaacatgtttgattataagatttccaaacatccacactttgacgaagcctgccgggctttcgcactacgtcacaacatggcgaagctagcagaacgcgccggaatgaatgtccagacgctgcgcaacaagctgaacccggatcagcctcatcaactgacaccgccggaaatttgggtgctgacggatatcactgaggattccgcgctggttgatggcttccttgcccaaattcattgcctgccttgcgtgccgctgaacgaagtagcaaaagagaagctgccgcattacgtcatgagcgctactgctgaaatcggacgtgttgctgccggtgccgtatcgggcgatgtgaaaaccaccgcaggccgccgcgatgttatcagcagcattaactctgttactcgtctgatggcactggctgccgtttcgatgcaggcgcgtttacaggctaacccggcgatggcaagcgcggtggataccgtgacgggcctcggcgcttcgttcggtctgatctgaggtggctatgttgactaaactaccatcactcgcatcgctgctcgttaagcaaagcccatcacctcatttcgggcatggctggatcatggggaaggatggcaagcgctggcacccgtgccgctctcaggatgaactgctggctgacctgtccacaaccaaacaggggaaatcatggctattgaaggcgctacggcgactgttccattaagccccggtaaacgcctagatggactgaaccatattgcggaattgagggctaaagtgtttggtctgaatattgagccggagcttgaaaggtttattaaagatatgcgcgatccacgcgacgtaaataataaacaaaatgagcgggcactggcagccattttttatatggcaaaaattccggcagaacgtcacggcgtcaatgttagtgatctgactactgacgaaaagcgggaactggtgaaagcaatgaatcattttcgtgcagtggtgagcttatttcccaaacggctaacaatgccgaattaatccacaacaaaaattaatggcgtaaacccgccgggcttcttattgcccaaattcaggagaaacaacgatgcgaaatattgaaacccgtaccactaaaaccggacctgatgatgctggactcaacctgttgctgactgaggcacgtaaagaagaacgccggggacgcgcagatgtgatggctgcgcgtctggattctttagctgctcgtatcgtgtcacgtcagcttaaccacacggaagcggctgagctgctgcgtcaggaagctgtgaagattcagaacgaagcgcaggagatccactgatggctgattcaatggacctcgtacagcagcgcgttgaagaagaacgccagcgccatatccacaccgcccgtaataaagcgccgggcgtttcccgtgtgctctgtattgattgcgatgcgccgatcccgccagctcgccgccgcgccattccgggcgtgcagtgctgcgtcacttgtcaggaaatagctgagctgaaaggcaaacactacaacggaggtgtcgtatgagcactatcctgaaatgggcgggaaataaaaccgccatcatgccggaactgattaagcaccttcctgctggtccgcgactggttgaacctttcgcgggttcgtgcgcagtgatgatggcaacagactatcctcattatcttgtcgcagatattaatcctgacctgatcagcctttacagcgtcatcaaaaacaagtctgaattactaattactattgcgaaagggttatttgataagaataacaccgcagaagattattacggtatacgtaaggagtttaattgtgatcgccactggcccgcagaatggcgcgcagctatgtttctttatcttaatcgccattgttatcgtggattatgccgttataaccagaaagggcagtttaacgctccatacggtaactataaaagtccttattttcctgaaagtgaaatactcgcttttgcagaaaaggctcaacgcgcaacgtttatttgtgccagttatgatgaaacactggcgctgctgcaggctggtgatgttgtttattgtgatccgccatacgatggtacatttagcggttatcacactgccggttttacagaggacgatcagtatcatctggcgtctattcttgagcgccggtcatcagaaggtcatccggttatcgtgtccaacagcgacacgtccctgacccgttcgctttatcgtaattttacccgccatcgcatcactgcaaagcgcagcatgggtgtggctgccggtgagagtaaatctgcaactgaaatcatcgccataaaatcagcagactggtttggtgtcgattttgcgtccggtccagatatctcggtggaaactgaggtgcgggcgtggcagtgagtaaattcacattacataatgcaccaaccaccggcggctcgaatgaggccgccgtggccttttcatggaataaccctaaaaaagcggttaatccctatctggacccggcggaggttgcgccggagtctgcgctttcaaacctgatcgctctttacgctgcggataacgagcaggagcagttgcgccgtgaggcgctgagcgatgaggtctgggaacgctatttcttcaatgaatcccgtgatcctgtccagcgcgaaatggagcaggaccggctgattagccatgccaaaatggcgcgcgagcagcagcgttttaatcccgatctggtcattctggctgacgttaacgccatgccgtcccatatcagcaagcctctgctggagcggattaaatatttccatagtctgggcagagcaaaagcctattcccgctacctgcgtaaaaccatcaggccctgtcttgagcggctggagcgcgtacgtgacagtcaggtgtctgcgtctttccggttcatggcgtgccacgacgggctggaagggctgctggtactacctgaaatgaatcaggatcaggtcaagcgcctttcaacgctggtagcggcacatatgagcatgtgtcttgatacggctcgcggtgatctgtttgtcagcgacgatgttaaaccagaagaaatccgccaggcatgggaaagggttgccgcagaagtcatgcgccttgaggtcatcccgcctgcctttgagcagctgcgccgcaagaagcgccgccgcaagccggtgccttatgaactgatcccaccgtcgctggcgcgtatgctatgcgcggactggtggtatcgcaaactgtggcagatgcgctgcgagtggcgggaggagcaactgcgcgccgtctgccttgtcaacaaaaaagcgtccccgtatgtcagctatgaagccgtgatccataaacgcgagcagcgccgcaaatctttggagttcttccgctcgcatgagctggtcaacgaagacggcgacacactggacatggaagacgtggtgaacgccagcaacagcaacccggcacaccgccgtaatgaaatgatggcctgtgttaagggactggagctgatagcggaaatgcgcggcgactgtgcggtgttctataccatcacctgcccgtcacgcttccacgcaaccctcaacaacggcagacctaatccgaaatggaccagcgccactgtccggcagagcagtgattatctggttgataccttcgccgctttccgcaaggcaatgcacaaggccgggctacgctggtatggtgtccgggtggcagagccgcaccacgacggcaccgtgcactggcatctgttgtgcttcatgcgcaaaaaagaccgccgttccatcaccgcactgctgcgtaagtttgccatccgtgaagaccgcgaggagctgggcaccaataccgggccgcgcttcaagtccgagcttatcaacccgcgtaaggggacgccgaccagctatatcgccaaatacatcagcaagaacatcgacgggcgcggactggctaaagaaatcagcaaagaaaccggcagatcactgcgtgacagcgccgagcatgtcagcgcctgggcgtcactgcatcgtgtccagcagttccgtttctttggtattccggggcgtcaggcataccgcgagctgcgcttgctggctggtcaggcggcaagagtgcagggtgaacgcaaagcgggcgcgccggtactggataatccgcgtctggatgcggtactggcggcggctgatgcgggctgctttgccacctacatcatgaagcagggcggtgtgctggttccccggaaacatcaccttgtccgcacggcctacgagcttaacgaagaaccgagcgcctacggcgatcacggtatccgtatctatggcatctggtccccgattgtagagggcaagatttgcacgcacgcggtgaagtggaaaaaggttcgcaaggccgttgacgttcaggaggcggcagccgaccagggcgcttgcgccccttggactcgtggcaataactgtccccctgtggaaataatgaacgaaaacgggccggaagaagatcggagttacctgatattgcgggtatggatgagcgggagctggaggatcatctccatagcatgagcaaaaaggagttgagggagctaaacgcgcggcttcgcatggtgaagtctaagcgctggaaaggatactggcaggaagtggataatcagcagtacctgcagttggagtatgaactgaaatcgagaggctttgatggttcagaggcggagatcgatctgcttctacgtggcggcagtattccatccggtgccgggctgcgggtcttttaccggaatcaacggctgcaggaagatgataaatggcgccagtggtactaagccatcctaaattggaggtttacaaacccgccagacctttaccgcgaattcgtgcaacttcatattttagttcgacggctttggcctcacagagccttaaagacttcaaccattgttctgctgttggcttaccaaatatgtcccgcataaccacaaccatgtaaaggcaacggccagtgcctagttcgcctgccactaggcatgtaacattcgttgctgctattagttctatacatgctttgcgcatcattttgtccctcagattgctacccttcaagagcatctcacttatgccatctgcttgaaagatagaaaaaacattttacattaaccttgttaattatatactgtgtttatatacagttgttttgattggaggggaaaatgcaggactattttatggagtcgttgaaactccagcgcattgattttttgtgaagcttgtagcggcgagtgaatgcgatgatgaagagaagcgactggcaatccagtgggtttcggagctgactgatgagttgatggcgaaaatccgtgctcatgagtacaaccgttcaatagatctctccagttagttataggaacgctgctgacgtcaggactagattctggtgtctgcagtgtcgaacaacgagccatgcgaggctttagagtttttgtgcatgtctatgctgcatgaaaacgcatgatcgtttgaggatcgttttcgctcccgcctgccaaaactggcgggctttttcatatttcatgcatgtgcatgaaaactgctacataaagcgggcaggcgtggcggggatacgagcgcgcgctgatataaatcacgagtgaattttctcagaattgatacaattttgttgctactagcgtttttgatggtaacttaacttttatatcgattttaatgcattttacactgagaagaaggatttgttttatggctgaactattaccacaaacgacttctgtacaaaccatttattcttggtttactgaaggtaagatttttgttaatagacgttatcaaagaaaattagtatggactgtactagaaaaacaaaaactaattgagtccatacaaaagaaatacccaatcccagcggttcttcttgccgaaagggaaaacgaccttggcacatatgaaataatagatggtctacaaaggttgcatgcaataatgtctttcatcgagacagggtatgaatcactcgatgggaaacgctttaatcttgatgctttcccaaccgcgaaaaatcgggctgatgaaggtaagtttacagcagtaaaaactgataatatattaagtcagcgagaagttactcagttattggattattcgctagctatgtctattatgcgcaatgcaactgagaacgaaataaacgatgtttttgatagaattaatacatatgggcataggcttagcgatcaagaaagacgccaggcgggtatacaaaataaattttcaaatatggttagggacatagcctgttcccttagaggtgatgtgtctgacgatatattgcttttagagaaaatgccatctattagtatagatttaccgctaacaaaacatggttatcaagttcaatcagaagatgttttttgggtaaaacatggaatcttacgttcaacagaccttcgtgacagtatggatgagcaatgcatcgcagatatagcagcatgtattgttggtggtaagttaattgaccgttcgaaagatgctcttgatcaaatttataataatgaagaagatgaatatggtcgtatcggatctgccattaatgtttatggcgaagataaatttgcagaggagtttaagttttgcattcaggaaataacaaaggtttgtaatagtgatggagacgtaaaactcagggatttaatttttacaaaacgtactacaaatgccttcccagctatatttgctgttctatttattgcttttcacgaactacttattaaagaaaataaaaagataaataactataaaggtgttagggataaccttaataacgtagtcactcgtttggatacgaaaagatctgctactggtggggatgaaaggaggaaaaatattaattctattattgggttgattaaagataattttattgatagcgctgataatagtcatatatataattctcataatactattgatattgaagatattttgcgaagatctgaaatcgaactagcaaactatgagttgaagcagggtttattaatgctgggtggaaatcgagatcttgatgatagtattcatgataaaatattctcaacaatttgtgccattgctaatattggaaagggtaataaaaatggcctggttggtaagttattgattggtgtaacagataagccaagtgatacagttagagtaaaagagcttgacgatatagatgcacatgttgttggtgagcgaagtgttgttggcgtaaaaagagaggctgcagtgcttggtatatcaatggaggagtattacagacgtttctgcaatgaattaaaacaatcggctttaagcgaacctctaaagtcacaagttgtgagtttaattgactataatgatttttatggttatggtgttatagttattacagttccacttctaacaaattattctagttataatggggatatttattatcgttctggagataatacaaaaaaagctactgttatagaagcagctgatattgcaacacgttttagataagtagacgtctgcgcctgctttggcaggcgctcgctgtaaacttaaaatctataaactataattgttaaatgtaattacatgttcccctatccaatgattaaattcttgcacctttttttgcaatggcaacagctcatttcggacaaaaacattagctgctttctctacatccccaaaccctccaacattactcggcatgatccccatcatctgtggcggaacgcggtgtgctgccatcatgtcatcgcggctcacattcttgatgttaaggaactcatcctttgccgccacctctgacagtgggatgatctgaataccgtcctttttgccgttgggcgagtacataaacaggttgcggaaattgcccggccctttagcgcttttcattgcctggcggatattgttcacatcttcctgattctgtgcggcgtcagtcatgtacatgatgaagcctgcatggctaccattgatgtaatacttacggcggaacagcgtggcggactcatttagcagggcggaaggtatagcggacaggtattccggcaggccataaatctcttggtttaaatccggctccataaggtgaaaaatgctgccctttgtgaactcataaggctctgttgtcatcccatactgcacaaaccagtaagtatcaagatccaggccacggcgagtatatttagctagcgacggctccagtgacagagtgccgccgagccggttagtgcgcttctccaaataggcgttaccgaatactagatagtcctgaacaaaccggctaaacgcctgctggcttaacagtggatgcgggataaaggtgctggtcaggatgttgcgtttgaccgcaattggcgagctgtgatgcacggcggcgcggtaagtgcgtgccagcccgtcaaagctcaccggcggttcataccagcgatccatctgcacgcactccacataatccagcaattccctgcggtccagtaccggaatcggatcgccaaagctgaatgcttctgcagatacgccactgttctgttgaacgttctgtttagctacagcgcggtttttattcctcttgcccatcaaaaaatctccacaatgttgctggtattggcggcttcgccctgcagcggttcgttaaacagtgcgtgcatcgttgcccaggccaaatctgcgtggctggcttcttcactgcggctggcttcgtaggtaggtcggtttccgctggccgtggtggcgcggcggatagccataaatgactgcgcaatgtcggtatgcccggcatcaaactccagacggcggtggctgataatgtcgtatgccttgagcaccagggcgtttttgacattggggttatagacaaactcccgcactgcagggaaaaagccttttacgttttcataaacaccgtgaccgacgccggtggagtcaatgccgatgtaggtcacgttatactgctgagtcagttttcggatggcctctgcctgggcgcggaagtccattccgcgccactggtgacgctcaaggatgcggaacttaccgccgggaacagtcggtggggcaatgactacgcagccagcgctgtcaccgttctgggtacctttcgccgggtcatagccgatccagacttcgcgccagccgaacggacgcagggccagcgcctgaaagtcttcccagacttcccagctgtccaccatgcaggcctgcaggtcagccagtgggaaaacggaggcgagatcgtcgatgaactcacacatcagcaggttctggtactcgtcggggctgtactccaggcgcagctggtcgagatcgaacaggttgcagccaccgcgcacggcgtcctccaccgtcacgatctgtctgaactgaccgtcaacgcaaagcagaccggcagcaagggctgagtgggtcaggtcgatatcaacgcgatcagcttttgcccgcccgcgattgaacagggcgccggaccagaacgggtaagcgctgtgcgtcaggctggaaggcgttgagaaataggtctggcgccatttcttgtgcagcgccatgccggaagcgactttacgtagctcctgaaatttcgggatccagaaatactcatcaagatacaggttgccgtggtagctctgtgcggtgcgggcgttggtcccgagaaaatacagcgtggcgccgtttggcagcaccatgggatcgccttttaattccacgtcgacttctttggcaaactcgatgatgtactgcttaaaaacatgcgcctgggctttactggctgacaggaaaatctggtttcgccctgtcatcagggcgtccatcagcgcttcacgcgcgaaataatacgtagcgccgatctggcgcgatttaagcacgttgcggatgcggtgcttaattcctgcttcccaccagtggcgctgatattcaaacattccgttgcggaaaatttcttccagcttttcgatctgttcgtcagtaaacaggttcttttctggtgtcttgcggggccgcggttgcggttttgcacgttggggttaaggtccgcctcattaccgccgttgttaaatttaccgatgcgggcgtggcgctcggactggcgcgccagcaggtctatttctttaaagtctttcccttccttgtgctccttcatgatgagctggcaatagcgggcggcagtggtgagctgcatctgatcgagtgggccatattcgccccacttgtcgcgctttttccagctgtgaacggttgcaactttctcgcccagcatttcagcaatgcgggctacgcggtatccctgaaaatacagcagtaatgcctgcctgcggggatcgaggtctgcgggggtcatcgtttccatggcacaaacatacggccttgcctggcgcctttccccggctggcctttgtatggtttaccgcacaaggtccgcgcgttgtttcactccccccatcaccgcaaacataaggctccagtaagttttttctaacggagcacggctcatgacagtgaaagcaaagcgtttccgtatcggggtggaaggtgccaccactgacgggcgcgaaatccagcgtgaatggctggtacagatggctgccagctacaacccgacggtctataccgcgctgattaaccttgagcacatcaagtcttatctgccggacagcacctttaaccgttacggcagggtaacggggctggttgcagaagaaattaaggacgggccgctggcgggcaagatggcgctttatgccgatatcgaacccacggacgccctggtggaactggtgaaaaagggccagaagcttttcacctccatggaggtcagcacgaagtttgccgacaccggcaaagcctaccttgtggggctgggggcgacggacgatccggcgagtctgggcaccgaaatgctggcattcagcgccagcgccgcgcataacccactggcgaaccgtaagcagaaccctgaaaacctgttttcggaagcagttgaaacgctgatcgaactggaagaagcccaggacgaaaagccgtccctctttgcccgcatcaccgcgctgttaaccaaaaaagagcaaaccgatgaggcgagtttctccgacgtgcataaagccgtggaactggtcgccaccgagcagcagaacctgagcgagcgcacggataaatccctgaccgaacaggacaagcgcctttctgagctggagtcctcactgcaggagcagcaggccgcctttgccgagcttgagcagaagctgagccgtgaagacagccgtaaagactaccgccagcgcgcgccgggcggtgacgcaccggcaggcaccctgaccaattgctgatggagcataaaacccgatgaaaaagaatacccgctttgcctttaacgcttacctgcagcaactggcgcgtctgaacggtgtggaagttgaagaactgtccagcaagttcaccgtagagccgtctgtgcagcagacgctggaagaccagatccagcagtccgctgctttcctgacgctgattaacatcacgccggtcactgagcagtccgggcagttgctaggactgggcgttggcagcaccattgccgggaccaccgataccaccaccaaagagcgcgagcctaccgatccgacgctgatggaggacgtggaatacaaatgcgagcagaccaactttgatacggttctgacctacgcaaaactggacctgtgggcgaaattccaggacttccaggtgcgtatccgcaacgccattgttaagcgtcaggcactggaccgcatcatgatcggctttaacggcgtgaagcgcgccaaaacctccaaccgtgctgaaaacccgctgctgcaggacgtcaataaaggttggctgcaaaaaatccgcgaagacgcgccggatcacgtcatgggcagcacaacaaaagacggcgcaacgactgcaggcgcggtcaaggtggggaaagggggcgactatgccaacctggacgccgtggtgatggatgccgtcaatgagttgatcgatgtggtttatcaggatgatgacgatctggttgtcgtctgcggacgtgaactgctttctgacaaatatttcccgctggtcaacaaagagcaggacaacagcgagaaaatcgccgccgatctgatcatcagtcagaaacgtatgggcggcctgcaggctgtacgcgcgcctttcttcccggcaaaagccctgctgatcacccgtctggataacctgtccatctactggcaggaagacacccgccgacgttctgttatcgacaacccgaaacgtgaccggattgaaaactttgaatccgtcaacgaggcgtatgtggtagaggactaccgctgcgcggcgttggttgaaaacatcgaaatcggtgatttcagcgcgcctgtcgcaccggaaggtggggaataacgcatgagcctgagtcccgcacggcagcaccgcctgcgcattcaggccgaacaggccgcccgtgagggcggcagtgttcgccatgcgtcgggctatgacctgatgctgctgcaacttgcagaagaccgccgccgcctcaagggcgtccagtccacggtgaaaaaggcggaaatcaaggtggagctgctgccgaaatattccgcctgggcggagggggtgctggctgccggaggtgcgcagcaggatgacgtgctgatgtacgtgatgctgtggcgtatcgatgccggtgattatgccggtgcgctggaaatcgggcgtcatgcgctgcgccatggctgggtgatgccgctgggcaaccgtaacgtgcagaccgtgctggcagaagaaatggcagacgcggcgcaaagcgctctgctagccgctgccggttttgatgccgatctgcttttgcagacgctggacctgacagccgatctggatatgccggaccagtcgcgggcgcgtctgcataaagccatcggcgctgtactgagcgaaagcaacccggcatctgccctgaatcaccttacccatgcgctgcagctcgatccccgctgtggcgttaaaaaagaaaagcagcagctggagcgcagactgcgcaatgacagccgctaaagaacgtgccccgcgcacgggcggcacggggtggcgaaaggcactgccacatcaaaatcccgtccaccgcccacttattcaggagaaagccgcatgaagtttgttgcgcccgaacaggcaccggaacaggcggaggtcatcaaaaatacgccgttctggcctgatgtggacctgtcggaatttcgcagtgtgatgcgtactgacggcacggtgacgcagccgcgtttaaagctggttgtgctgactgctatttctgaggttaacgctgagctgtacgacttccgcaagcgtcagcagatgctgggctggcagtcacttgcagacgttcctgcagaaatactcgacggcaaaagcgagcgtatccagcactaccacaacgctgttttttgctggctcgcgctgtgctcaatgagcgttatcaggactatgacgccacggcgtcaggcgtgaagcgaggggaggagctggcggacgccagcggcgatctgtggcgtgatgcccgctgggcaatcagccgggtgcaggatgcaccgcactgtacggtggagcttatctgatgaaagtgcgtgcgcatcagtatgacacggtggacgcgctttgctggcgtcattacgggcgcacgcagggtgtcactgagcaggttctgcaggcaaatccggggctggctgagtacggcccatttttaccgcacgggctgcaggtggagctgccggacattacggcgtcaaccacggcgcagaccgtccagctatgggactgaattatgacgcttgaacgaatcagcgcctttatcacttactgcatcgccgtgctgctggcatggctgggcgatctgtcgctcaaggatgcgtcaacggttggcggtgtactgattggtgtgctgatgctggctatcaactggtactacaaacaccagtctttcaaattgttacgtggaggcaagatttcgcggagggaatatgaatccttcaatcgttaagcgctgccttgtcgggcggtgctggctattgttgccacgctacccggtttccagtcgcttcatacctctgttgaggggctgaaactgattgccgattacgagggtgccgcctgcagccttatcagtgcagcgcgggcgtgtggaccgacgggatcggcaatacgtccggtgtggtgcccggcaagaccatcacggaacggcaggcggcgcaggggttaatcagcaatgtgttgctgacggaaaaaaggcttgatgcgtgcctgaaggtcaggcccccgcagcatgtttacgatgcgctggtaagcatcggcttcaacgtgggcaccggcgcaatatgccgatccaccatggtgtcctacatcaaccgccagcagtggtggcaggcatgcaacgagctgccgcgctgggtttacgtcaacggtaagaaaaataaagggctggagaaccgccgcgcgcgggagttggcctggtgccttaaaggtgctggtctatgagacgtgctttagtggcggtgctggcgctgacgctcgcggcgctgggctggcagtcgtggcggcttaacaatgccagccacattatcgagacgcagggcgcggcgctgaaaagcaaagcgcaggaactgacgaagaaaaacagccagctgagcggcctgtctattctgaccgaaaccaacagccgggagcagatgcggctttatgcggcggcggagcagacctccgcgctgctgcacaaccgtcagcaccggatagaggaactgaaacgtgaaaatgaggatttgcgccgctgggctgacactcctttgcctggtgacgttatccggctgcgggagcgtccggccctcgccggaggtgcagcttaccgtgagtggctgtcccagagtgacgcagtgccgcctggaaaggtcagcgccgcgcagtaacggcgatctgaatgcggtgctggatgaaacggaggccgcctgggcggcgtgtgctgacaaagtggacacgataattgcgtgtcaggagcgagacagtgaacaagccgcagtctttacgcagcgccctgaataaggcggtgccgtatgtccgcagtaacccggacaaactgcacctgtttgtggataacggctccctagtggcaaccggtgccagctccatgtcgtgggaataccgctacaccctgaatgtggtgattgaagacttcagcggcgatcaaaatctgctgatggccccggtgttgctgtggcttatggagaatcagccggatgccatcaataaccctgaactgcgcgaaaagctgttttcctttgaggtggatattctgcgcaacgacatttgcgacattagtctggacctgcaactgacggagcgcattctggtgagcgctgagggcgggatctcaatcgttaaggcggagccagagccagaagaaccagaagaaatgtggacggtgacgcatggatgaactacagaaagtcgatacctggctgacagcgttgctggcaaatcttgagccagcggcgcgcaagcgcatgatgcgggaactggcgcagcagctacgccggattcagcaaaacaacattcgactgcagcgcaatcctgattgcaccggctacgagccgcgccgggtaactgcccggacgaaaaagggccgcatcaagcggcagatgttcgccaaactccgcaccaccaaatacctgaaaactgccgccactgccgactctgccagcgtgcagtttgccgggcaggtgcagcgcattgcccgggtgcatcattacggcttacgtgatcgtgtaagccgtaagggcctgaggtgcgttatgcagagcggcggttacttggccttaatcaaaaaacgaatgacataattcaggatttgatttttagctggttgaacaaataatcataaacgccactttgttattttactcattgggtgatttttaagcatccaattagctaattcacctaacgtacctttttcttttgcaaaaatctcagcagtgcgagggaaattatcggcattgaattgcctatggggtctttaaatttgattggttcgtaacgaaacttatacttccagttggctaaggctgctaaactcagagcgatatgtgtgtctttaattttgtaataggtttttcttgctgtgtctaaagagcatctttcgccaagcgtgattgcttttattgcgtcaagtggaatttcattggtatatatgtcgaaagcttttgcttttcctttcgcctttttgcagtatctaaatggttttactaatctccattctttttcgtaactccatacatccggctttatacacaagtcagccactggaatggtttcattttctaagaagtagtttatgtgaatcataggtctttcttgacggtattttacttcaaacaatccattaaaatagtcatgatcttcatcgaattcgataactgcgccactgtattcatccgcatagtgagcccacattaaatgagagtcggaatttctagataaacataacattccaatttctttattcaagttactgattagctctcttgagaatatgtcattgcaattttcatgttcgaaatcatcttcaagaaaatagttgtcaataaatctttcattcgtgtttgtgtcgaagcgtaggtttattctttcctcagggtttgtggttacgtcaggattgaatacttcaagagccaattcaaacggatcgttaaaccccctggctgagtgaatcgaatagaaccgttgagaatgaactctaacgtatttgctgttacatatttgtataacgacatcaagaatatccccgtttttttgatgtcgtgattattgtgtcatttcccgtacaagatcaaccaaatgcgcgctatggggagttattgcattctaagtcttatgaacgcacaactgaccgaaatcatgcgccttatcaccaacctgatccgcaccggaactgtaacggaagtggaccgggaaaactggctgtgccgggtgaaagtgggcgagcttgaaaccaactggattaactggctgacactacgtgccggtggtgcccgtacatggtggtgcccctcgccggaggagcaggtggtggtgctgagcatgggcggcaatctggaaaccgcttttgcgttgcctgccatctattccaatcagtttgcgccgccgtctgattccgtggacggttgcgtgacggagtacccggacggtggctggtttgagtatgaacccgccaccgggcgatggcatgtcaggggcatcaaatccatggtgatcgaggcggcggacaatatcaccctcaaaactggtgagtttgtggtggaggctgacaacacgcgcattaacagcgagatggtgatcaatggcagcgtcacccagggcggcggagcgatgagttctaacgggatcgtggtggataaacacggtcacaccggcgtgaagtccggcggcgatacatcaggaggcccggtatgacgctgtatatcggcatgagccagggcaacggtaaagctattactgatacggaccatctgcgccagtcagtgcgggatattctgctgacgccgcagggcagccgtattgcccgccgggaatatggttccctgctgtccgccctgattgaccagccgcagaatccggcgttacgcctgcaggtcatgtctgcggtctatgtggcgctgagccgttgggagccacggcttacgctggattccatcaacatcagcagcaattttgacggctccatggtggttgagcttaccgggcagcgtaataacggcgcgccggtttccctttcggtatcaacaggagcagaaaatggcagtaattgacctttcccaactgcccgcgccgcagatagtggatgtgccggattttgagacgctgctggctgagcgcaaggccgcttttgtggccctttatccgctggatgagcaggacgcggtacggcgcacgctggcgctggaatctgaacccgtcaccaagctgctgcaggaaagtacctaccgcgaaatcctgttgcgccagcgtattaatgaggccgcgcaggcggtcatggtggcgtatgccatcggtggcgatctcgatcaactggcagccaactacaacgtgaaacgcctgacggtaacgcctgccgataacgacgcagtgccgccggttgctgccgtcatggaaagcgatgaagcgctgcgcctgcgtgttcctgctgcgtttgaagggttgtccgttgcggggccgacggcggcttatgagtttcacgccagaagcgcggacgggcgtgtggcagatgccagcgcaaccagcccggcaccggcggaggtggtgcttactgtactgagccgggagggtgacggtacggcagggactgatctgctgtcagtggtggagcaggcgcttaacagcgagaacgtgcgcccggtggcagacagactgacggtgcgtagtgccgaaataatcccgtacagcgtggatgcgacgatctttctttatccggggccggaggctgagccggtgatggcggcggcaaaagccagcctgcagaagtatatcgccagtcagacgcggctgggccgtgatatccgtcgcagtgccatttatgccgcgctgcacgttgagggggttcagcgtgtggagctggcctcaccgctggatgatgtggtgctggataagacgcaggcggcatcctgtacggaatggagcgtaaccaacggtggcacggatgaatagtctgctgccgcctggttcatcgccgcttgagcgccggctggcgcagacctgcagcggaatttccgatctggaagtgccgctgcgcgatttatggaacccggcaacgtgtccggtcagctttctgccgtatctggcgtgggcgttttccgttgaccgctgggacgaaagctggacggagagtgtcaagcgccgggtggtacaggacgctttctatattcatcagcataaggggacaaccagcgccgtgcggcgcgtggtggagccgttcggcttcctgatccgcatcattgagtggtggcagaccggcgagcaaccgggcacgtttcgtctggacattggcgtgcaggagcaggggatcacagaagaaacctatctggagctggagcgcctgattagtgacgccaagccgtgcagccgccatctgattggcatgtccatcaacctgcagaccagcggcccctatttcgtgggtgcggctgcctacaccggcgaagaaatcacaatctacccgtatatcaacgaaaccattatttccggcggcaccgcttatgagggcggggcagtccatgttattgacacgatgagagtgaatccatgagcgctaaattttataccctgctgacggatatcggcgcggcgaaactggcaagcgccgccgcgctcggtgttccgcttaaaattacccagatggcggtgggcgacggtggcggcgcgctacccacgcccagcgcacaacagacaaagctggttgccgaaaagcgccgcgcagacctcaatatgttgtatatcgatccgcagaacagcagccagattattgctgagcaagtgatccctgaaaccgagggcggttggtggattcgtgaggttggtctgtttgatgaaactggcgcgctgattgccgtgggtaactgcccggagagctacaagccgcagctggcggaggggagcgggcgcactcaaaccgtgcgcatggtactgattaccagcagtaccgataatatcaccctaaaaattgacccggcagtagtgctggcaacccgcaagtatgtggatgacaaggtgctggagcttaaggtgtatgtggatgacctgatggcgaaacacatcgcggcaactgacccacatccccggtacgcaccgaaagccagcccgacattcaccggcacaccaacagcgcccacgccagcaagtggtgataacagcaagaagctggcgacgacagaatttgttgttaaatcggtggcgagtctggatgaaaaaaatcaggctaaataccttcctaaagctggggggatattacaggccggttgggtgttgccggtaaacttgaagttggtaagtccgaaactgaatcggttattgcgttaggttcatccaacattctgagagataacggcaaaaaagcacttgttatcagtagtgagtctggtgcaggttcgacagcaggaatatatttgcgccctattggtagtaccgacagctcaatcgagttacatgggagcagcagcgggtggaacttcaccggtacaccaacggctaccacgcctgcagctacggacaaaagttcaaaactggctactacccagtttgttgcgagagcaattgcgaatcttgcgggtagtgcccctgagacgctggatacgctcaaagaactagctgatgcgctgggcaacgatccaaactttgcgaccaccgttctgaataaactgactgagaagttagcaaaagaccagaatggcgctgatattccagatcccactgcctttatcaaaaatctgggcttaagaggcgcgatcacaggtactgaatccatgtttcgtcttccggcgtttattaatggtcagccgggagaatatgttattcagacacaacaattaaccagcaatacaagtagcggtttgattgtattccctgaggcatttaacaataagtgcatgattatcattgccgttgattatgcttctgctgctgttgataactcgcgtgtcagatttaatgtgcctactaaatcgcagtgtgaatggtttgggcagaccatgtccgttaatccaactcccgttagcccttccacatgggcatggctggcaatagggtattgatatgaaatatttcacggcaaaaccggttggtctttatgacgacgaaaataatattattcctgctgatgctatcaatataagcgaggaacaatatcagctattacttgagggacagcgcaatggtaaatttatacaggctgattcttctggttcccctgaactggtggatgaattcccgttagcacatactgaattagttgctattgtaaaaggtcagcggtctgaatttctggcaacagctaatacagagattgcatggcggcaggatgcgcttgatgcgggaattgcgacagaagacgaaaccgccacgttggcagcctggagaaaataccgggtgctgctgatgcgggtggatgtatcgatggccccggaaattaactggcctgaacctcctgaagaataatcccgtccccgcacttgcggggatttttttgccacatccattgtgtcatttcccacacatagaccggcacgtgcgctgcgcgcatatcaaccagaacataggcacaccccctgtaaaccggagagactgccttatggctcaggattaccaccacggggtgcgcgttgttgaaatcaacgagggcacccgacccattaccacggtgagcaccgccatcgtgggcatggtctgcaccggcgatgatgctgatgcgtccatgtttccccttaataagccggttctgctgaccgatgtgctgaccgccagcggcaaagcgggtgagtccggcacactggcgcgctcgctggatgccattgccgaccaggctaaacctgtgactgtcgttgtgcgtgtggcgcagggcgaaaccgaagcggaaaccacctccaacattatcggcggtgtgaccgctgacggtaaaaaaacgggcatgaaagcgctgctttcggcgcagtcgcagctcggcgtcaagccgcgcattctcggcgtgccgggacacgacacgcaggcggttgccactgagctgctgagcgtggcgcagagcctgcgcgggtttgcctatctgtccgcctatggctgcaaaacggtggaagaagcgattgcctaccgtgacaatttcagccagcgcgaggggatgctgatctggcctgactttatcaactttgacaccgtgctgaatgccgatgcgacggcttatgcttccgcccgcgcgctcggcctgcgtgccaaaattgacgagcagaccggctggcacaaaaccctgtccaacgtgggcgtgaatggtgtcaccggcatttccgctgatgtgttctgggatctgcaggacccggcaactgacgcaggactgctgaaccagaacgacgtcaccacgcttatccgcaaagatggcttccgcttctggggttcccgctgcctcagtgatgatccgctgtttgcttttgagaactacacccgcacggcgcaggtgctggctgacaccatcgcagaagcgcacatgtgggcagtggatggcgtgcttaacccatcgctggcccgcgacattatcgaaggtatccgcgccaaactgcgcagcctgaaaacgcagggctacatcatcggcgcagactgctggctggatgaggcggtgaacgataaagactccctgaaagccgggaagctcaccatcgactacgactacacgccagtgccgccgcttgaaaacctgatgctgcgccagcgcatcaccgatcgatacctgctggatttctccagccaggtcagcgcgtaaggggacaccatggctttaccacgcaagttaaaacacctgaacctgttcaacgacgggaacaactggcaggggatcgttgagtctctgaccctgccgaaattcacccgcaagtttgagaagtatcgcggcggcggtatgccgggcgcggtggacgtggacatggggctggatgacggcgcactggatacggaattttcaatcggcggcaccgaacagctgttattcaagcagatgggcaaggctaccgttgacggcatccagttgcgtttcaccggctccattcagcgtgacgataccggcgaagtgcaggccgttgagctggttgtgcgcgggcgtcataaagaagtggattccggcgagtggaaaaccggagagagtagcgccaccaaagtcagcagcaccaacagctacgcgaagctgaccattaacggtgaggtactctatgaggttgatgtggtcaatatgattgaaatcgttgacggcgtggacctgatggaagcacaccgtaatgccctcggcctctgattaaccttaacggcgcgggaagccgcgccagtatttcattaacaggaaaagaacatgaacgataagctgactgaaaagaccgtaccactggatacctcgatcaagcgcggtaaaacggaaattactgaaattgtgctgcgtaagccgcaatccggcgcgctgcgtggcacccgtctgcaggccattatggatatggacgtgggcgcgatgatgaccgttattccgcgcatctccactccgacgctgaccgcgcaggaaatggctgagctggaccctgccgatctcaccgcgttgtcggttgaggtggtgacttttttgttgaagaagtcggtgcttgccggtttaccgacagcctgacggttgatgatctggtggcagatattgccaccatctttcactggtcgccgtccgtcactgacgttatgccgctgactgatgtgctggagtggcggcataaagcgattcaaagaagtggggccagcgatgagtgacaacaacctgcgtctgcaggtgattcttaatgcggttgacaagctcacccgcccattccgaaccgcgcagaccagctcaaaagagctggctgcagccattcagcaaagccgcgcccgtttaaaagagttagatgcccaggcgggccgtattgacggtttccgcaaggccagcgctcagttagtagtcaccggtaacagccttaaagccgcacgcgaagaagcggctaaacttgccacgcaattctctgctaccaaccgcccgacggcggcgcaggcgcggctgcttgagcaggcaaaaaaccgtgttacagagttgcagagcaaatataacggtttgcgtcagtcggtacagcgccagcgtcttgcgctcaatgaagccggactggacacgaaaaagctcagtagtgcgcaacgggaactgcggcagaatgccgacgaaacccggcaggcgctggaccggcagcagaaatccctgaaacgcctgggcgaacagcaggcgcgaatgaacgccgtccgcgagcagtattcgcgccgtcttgaggtgcgggatcgtatcgccggggcaggggctaccaccacggctgcaggagtggcaatgggtgcgccagtagtggcggcagttaagagctacgccagcatggaagatgccatgaaaggcgtggcaaagcaggtaaacgggctgcgggacgataatggcaaccgcacgaaacagttttatgacatgcaggctgccatcaaagccgccagtgaacagctgccaatggagaatggcgctatagattatgccgcgctggttgaaggtggcgcacgcatgggggtgaccaatcaggacgctccttacgaagaccagaagcgtgacctgctggcctttgcttccacggcggcaaaagcggcaacggcgtttgagctacccgctgacgaactggcggaagggctgggtaaaattgcgcagttgtataaagtccccacccgcaatattgaacagctgggtgatgcgctgaattacctggacgataacgccatgtcaaagggtggggatattatcaacgtgctgcagcgcatggggggcgtggctgaccgcctcgacttccgaaaggccgccgcgctgggttcaaccttcctttctctgggcgctgcgccggaaattgccgcgagtgcctcgaatgccatggtacgtgaactttccattgcaaccatgcaaagcaagcgcttttttgaaggtatggacttgcttaaactcaatcccgcagagattgagaaacagatgaccaccgacgcaatgggcactatccagcgcgttctggagaaggtcaacaagctacccaaagataagcgcctgtctgccatgaccatggtttttggcaaagaatttggtgacgacgcagcaaagctggctaacaacctgccggagttacagcgtcagctaaaactcacctcaggcaatgaagcgaacggctccatgcagaaagaatctgatattaataaagactctttatctgcgcagtggttgctggttaaaacaggtgcgcagaacgctttcagtagtctgggcgaaacgctacgccagccactgatggacattatggattctgtaaaacgcgtcaccggtgcattacgtcgctgggtggagaccaacccgcagctggcaggcacgctgatgaaagttgcagcagcgactgccgcgatcaccgttgtgctcggtacgcttgcagtggcggtggctgctgtgctggggccgctggcggtgatccggttgggcctgtctgtgctgggtgtaaaaactttaccttctgtcactgccgcagtgacccgcaccggcagtgcgttgtcatggctggcaggcgcgccgctttccctgttacgtcggggatggcctcatccggcggcagtgccgggctgctgagtgctccccttcattccctgcgacgttccgccgggctggctggcaacgcactgaaagcggtagcaggtgcaccgcttaccatgctgcgtgcgggaatgtcaggcatacgtaatgttattggtatggtgatgaatccgctggcggcgctgcggggtgggttatctgccgctggcggcgtgctgcgctttttggtttccggtcctatggcattacttcgcgttgcgctgtacgggatttctggcctgctgggtgcgctgctcagcccaatagggctggttgtagctgcgctggctggtgtggcgcttgttgtgtggaaatactggcagcccatcagggcatttttaggtggtgtggtggaggggtttaaagccgcagctgcaccgatcagtgctgcctttgagccattgcggcctgtttttcagtggattggtgacagggtgcaggctttgtggggatggtttaccgatttgctcacgccggttaaatccacttccgaagaactgaacagcgcagcggcaatggggcgcaggtttggtgaggcgctggctgaaggtctgaatatggtgatgcacccgcttgagtcgcttaaatcaggcgtgtcgtggttgcttgaaaaactcggtatcgtcagtaaggaggcggcaaaagcaaaactccctgaacaggttacacggcaacagcctgccacggtgaacagtgacggtaaggtagtgctgccgccaggcggatttccgtctatggggtttgcaggtatgtatgacagcggaggcacgatcccgcgtggtcagtttggcatcgttggggagaacggccctgaaatagtgaacggtcccgcaaatgtgaccagcagacggcgcactgccgcgctggcttccgtcgttgccggtgtcatgggcgtagctgcagcgcctgcagaggccgcacctctgcatccgtacagcctaccagcaatggcatacaaacaaagtcaacctgtgaaatctgccagcgtaccgtcagtgatccgttatgagattaacgcgcccattcatatcactgcccagccagggcagagtgcgcaggatattgcccgcgaagtcgcgcggcaacttgatgagcgcgagcgcaaagccagggcgaaagcgcgcagtaatttcagcgatcaagggggatatgattcatgatgatggtgcttgggttatatgtctttatgttgcgtaccgtgccctatcaggagctgcagtatcagcgaagctggcgacacgccgcaaacagccgggtgaaccgccgaccatcaacgcagtttcttggaccggataacgattcgctgacgttatctggtgtactgctgccggaagtcaccggcggcaggctttcattgttggcactagagcaaatggctgagctgggcaaagcgtggcccctgattgaggggagcgggaccatttacggcatgtttgtgatcgaggggctgagtcagacaaaaacggagttttttgcaagcggaatgcctcgccgtattgagtttacgctgaccctgaaaagggttgatgagtcgctgtctgatatgttcggtaatctcagcgatcagctcagtaatctgcagaactctgcaacgtctgcaatcggtaatattaaaaacacggttggagggatgctgcagtgaatgttagttctgaactttttgatcccaacagcaaaagcccggctttcagtatcaccattgaaggtaaggacgtgactaccgtactggatgcacgtctgctgagtctgacgctgaccgataaccggggttttgaagcagacctgcttgatttggagctggacgacgctgacgggcagattgttctgccgcgacgtggtgccgttatccagctggcgctgggatggaagggccagctgcttttcccaaaaggagcattcactgtggatgagatcgagcatagcggtgcccctgatcgtcttaccatccgggcgcggagtgcagatttccgggaaaccctcaatacccggcgtgaaaagtcatggcaccagacaacggtggggaggttgtaaaggaaattgccgcccggcataaactcaaaatggcgctgggtaaagacctgacagataaggtgctggatcatatggaccagaccaatgaaagcgatgccagttttctgatgaaactggcgcgccagtttggcgcgattgcttccgttaaggatggaaacctgctgtttatccggcaggggcagggaagaacggcgagcggtaagccgttgcctgttatcaccattgagcgtaaagccggtgacggtcatcgttttaccctggctgatcgtggtgcttataccggcgtaattgccagttggctgcatacccgcgaacctaagaaaaaagaaacaacgaaagttaagcgccgtcggaagaaaaccaccacacctaaagaggcggaagcaaaacagggtgattatctggtgggaacggatgaaaacgtgctggtactaaatcgcacctatgcaaaccgcagtaatgctgagcgtgcggcaaaaatgcaatgggagcgcctgcagcgcggtgttgcgtcattctccctgcagcttgctgagggccgggcagatctctatacagaaatgccagtaaaggtgagcggttttaagcagcctatcgacgaggccgaatggatcattacaactttgacgcatacggtcagcccggataatggctttactaccagtctggagcttgaagtaaaaattgatgatttagaaatggaataaataggttctcaatattgattatatgtgtatcattattgagaacttaaggtggcggagaataaaaaatgatgaattgcccaaagtgtggacatgcggcgcatacccggagcagttttcaggttacggacagcacgaaggagcgttactgtcagtgccagaacattaattgtggcagcacatttgtcacccatgaaacggtagtgcggtttatcgtaacgccgacattaattaataatgcaccaccgcaccctttgccgggggtcaaggacacatgaatttttaaaccaagaacctgctgaggcaggtttttttatgcgtcaggaatttcacccgttcatgtgaatcacattcattatctaaacggatacagaagtgttgagcattgggtaaagcggctgccgccattttgccgccaccatcaaagaaaaaagggttacgttttcacgtaaccctttgttttgtttggtggagctggcgggagttgaacccgcgtccgaaattcctacatcctcggtactacatgcttagtttgtctttacattcgcacgccagctgcggacagacacgccactaacgaactagcctgattagttttagcacttcaaccccaggcagggcatccgcgcgatctcttttgggtttgacctctcttgatcccgtcctaagagcggaggctagggagagagggctctaagcaggttattaagctgctaaagcgtagttttcgtcgtttgcgactatttttttgcggctttttacgaggccaaccgcccctcggcatgcaccttgggtttcgcgaatcccgtcgaatccagaatcagccccaatgtgtacttgaagtataacagatttgtgaaggtggttaccagcccccgaagcgaggattctggcggcatatcgagtgaaaaagcagcgacaacagcaatatagcgtagggccagagggagctggcccgcagagagggagggattaccgcccggcgttcttcatgatgcgcgccttatcgaccgcccattcacgatcttttacgtcggtgcgcttatcgtgctgtttcttacctttcgccacgccgattttcactttgcaccaggcgttcttccagtacaacgacagggcgacgacggtataaccttcgcggttgatgcggccatatagcgcatcgagctcgcgctgattgagcagcagtttgcgggtacgggtcggatcgcaaacgtaatgcgtggaggcgaccgccattggcgtaaagttggcgccgaaaagataggcttcgccatctctcagaatgacatagctatcgccgatgttggctttgccggcacgcagagattttacttcccaaccctgcagcgcgaggcctgcctcgtattcatcttcgataaagtattcgtgacgggcgcgtttattcagcgcaatggtggctgatccaggtttgtgggcttttttcttagtcataatgtcctgaagtcatcgctagttctaaacattgttacctcaatccttcctgcgaggcgtaatgggctatcttagcacgagttatggtacagcgttttttttagcagcagataaatgatattatttgtcctgtgtttaaatgtggaacctgctatgcctcagattagccgtactgcgctggtgcctttcagcgtggaacagatgtatcaactcgtaaatgatgtgaagtcctatcccgatttcctgcctggctgcaccggtagccgagtgctggaggccgggccgacgcaaatgacggcggcggttgatgtgtccaaggccggcatcagcaagactttcacgacgcgtaatacgctgaccgataaccagagtatcctgatgagcctggtcgatgggccgttcaaaaagctgattggcggctggaagtttattccgctcagcccggatgcgtgcaaaattgagtttcatctcgattttgagttcaccaacaagctgattgaaatggcttttggtcgcatctttaaagagctggccgccaatatggtgcaggcgttcaccacgcgcgccaaagaggtgtatcgtgtcggctaatattgtggttgaagtcgcctatgcgttgccggaaaaacagtacctgcaacgcgtgaagctgcaggttggggcaacggtcgagcaggcgattatctccagcggtatcctggtgctgcgtgaagatatcgatctggcgaagaataaagtcggcatctacagccgcccggtcaagctgcacgacgaagtccacgatggcgaccgcgtagagatttatcgcccgctgattgctgacccgaaagagctgcgtcggcagcgagctgaaaagcacgccgagaaataagcgggaatgcacaattaaaaaaagcgctcattgagcgctttttgcatttctacaggcctgagattacttggtcagcgccggtttgttatcaatgttggttaacacaccgctgctgtcaaaggtcagcgtcagggtctgctgggtcactttctcatggcccggctgctggcggaaaacgtagaaccaggtgttgctaccaaatggatctgacatcatcggcgtacccagagcataagcaacctgctgttgcgtcatgccgacacggatttttgctacatcattaggtgccagatagttaccctggttgatatcaggacggtaaaccactcgttccagagtggaacagcctgcggtcaacataaggagaaccgctgcggcagcagtcagcgttttacagcgcatagtgatttgattcctttttgggcccgagcaatacgtggctcatctgtaatatgccgataataatagacctttgcccggttgggaaccttcgactgcaggtctattggcaatttgctgttcactatgactctgtgaaaatcaaaaagtttacgccgcaagcaactctttcgcgttcgccagggtgttgcgggtcacctcgctaccgcccagcagacgggccagttcctgcagtctggcgcgtttgtccagcgcatgcatgtgcgtctcggtcatctcgccatcggtctctttgcagacgaagaaatgatggtgaccacagccagcaacctgcggcaggtgagtcacgcacatgacctgcgtggattctcccaactggcggagcagtttgccgaccaccgccgccgtcgggccgctgatgccgacatcgacctcatcgaaaatcagcgccggggtttccattttacgagcggtaataacctgaatagccagtgcgatacgcgataactcgccgccggaggccactttagcgatcggctgcagcggttgccccgggttggtggtaacgcggaactcaatatggtcggcgccttcggcggtcagatggcgttcatcgaaggcaacatcaatggcaaacacgccgtgaggcatagaaagtgagtgcatactttcagtaatcaactgggtgagttcgtcggcgctgcgctgacgcagggcgtgcagttcttgcgccgtttccagcgccaggcggtgatgctcaacgaccagctggctcagcgattccagcgaaccggcgctgtcgtccagcagacgctgctcatccagcatggcctgatagaacgccggcagctcttccggcgcaatctgatgcttacgcgccagcgcaatctgccgggaaatgcgctgttccagctcgaacagacggttagggtcgagatcgagacggtcattgtagtggcgcagctcatcggtcgcctcgctgagctgaatagaggcttcttccagcatatcgagcacgctggagagtttgctatccataccgaccagctcgctaaccagctgtttagcggtataaagctggctttgcaaattggcctcttcaccgtcggccagtaccgttaacgcatgctgacaggtactgagcagctggccgctgttggccagacgtttgtactcttcatcaatctgttcgaactcgcccggcagaggattaaattcgttcagctctttgagctggtattgcagcaggtctgcgcgggcggcgcgctcctgactctgctgctgatgctgcgccagctcccggcagctctggtgccactggcggtagcgctccgccatgcgttgagtaagcgcatactcaccggtataaccatcaagcagcgttttctgatgttcggctttggtgagtaactgatgggcatgctggccgtggatctggataagcaactggcccagctcgcgaagctgagaaagaggcacggcggtgccgttgatgaaaccgcgggagcggccgtcagcgctgatcacgcggcgaagtaaacactcacgcccgctctccagttggttctcttccagccagcgctgggcggcaggggtatctttcagcgcgaagcgcgcacacaggtcggcacggctggcgccgcggcgcaccatgtcagcttcggctcggccgccgaggcacagccccagcgcgtcgatggcaatggatttcccggcgccggtttccccggtgatggcggtcatgccgctgtgaaaatcaatttccagttcacgaacgatagcgaaattgctgatggtgagttgcgccaacatagctgccttcctgtatgaaaaaccattactgtgttttcgtacagtatatactggttttttatccagtaaagaggcagcttataaaatcagaacaattttttcgaccacccaagcttggtgcttaatgtgttgaaatagctgtagtctttgggatgaatcagattgaggtgataatcacagcggcggatgagcacatcttcgccgtcctgaatgggcagcgcaatctggctgtcgcagctgatttccagatcgttgcagcgctgcgagaagcgcaggcgaatggtgctatcgccgttaatcaccagcggtcgcgctgatagcgtatgcgggaacatcggcaccagggtgatggcgtccagagaaggggtgagaatagggccgccggcagagagcgaataggccgtcgaaccggtaggcgtggagatgatcaggccgtcggagcgctgggagaaggcgaacacttcatcgatatagacctcgaactcaatcatgtgcgcgactttacccggatgcagcactacttcattgatagccgtgctgatgcgcttctggcagtcatgctggcacacctgggcttccagcagaaaacgtttttcggcgatatagtggccttcaagtacgtcggccaactgctggagcgcgttatccgggtcaaggtcggtaagaaaaccaagattgccacggttaatgccgatgacgttgatgtcatagcgcgccagggtacgcgccgcgccgagcatatttccgtcgccgccgaccaccaccgccagatccgcctgctggccgatttccgccagcgtgccggttttaacattgctaagctggagttcatgggcgatttgctgctcgaccagcacctcatagcctttgccgcatagccagcgccagagcatttcatgtgtggtcagggcggttgggtgacgagggtgtcccacaatgccgatacacttgaaatggttcttcatgatctggatgtccttgggttaaatgaatgatgacaatctgtctgcttcccttgaatcccggaaactgatccccataataagcgaagttagcgagatgaatgcgaaaaaaacgcggagaaattcatgagtagtaaagaacagaaaacgcctgaggggcaagccccggaagaaattatcacggagcagcacgacaacgtagaggcggtagagcctgaggtttctgctgagcaggtggatccgcgcgatgaaaaaattgcgaatctggaagcacagctggccgaagcgcaaaagcgtgaacgtgatgtgatgctgcgcgcaaaagcggaagaagacaacctgcgtcgtcgcaccgaacaggatatcgagaaagcgcataaatttgccctggagaagttcgtcaacgaactgctgccggttatcgatagcctggatcgcgcgctggaagtggctgataaagctaacccggatatggcgccgatggttgaagggatcgaactgactctgaaatcgatgctggacgtcgtgcgtaagtttggcgtggaagtggtagccgataccaacgtaccgctggatcctaacgtgcatcaggctatcgccatggtcgagtctgacgatgtggctgccggcaacgtactgggtgttatgcagaagggttataccctgaacggtcgtactattcgcgccgcgatggtaaccgtcgcgaaagcgaagtaattcgttagttcgccagtaacggctgcctgcgggtggccgtttttattggctttaaataaaaaaacggcgaaccgaagttcgccgttgttctttgctggctgcgctattccgccacgctttcgcgtaatgatttcaccggcatcaccttcacctgcttaatcatattgtcctgtacgtcgagaatatcgatatcatactgttcgatacgtacgcgggttccagggactgggatctcctccagcgcttccagaataatgccgttaacggtacgcgcgtcgtcttccggcaggtgccagttgaacgctttgttgatttcccgcacgttggcgccgccgtcaataatcaccgagccgtcattaagcggcgtcacttcttcggcaagggtcggcgacattgaggtagtgaagtctcccacgatttcttcaagaatatcttcaacggtgaccagcccctgaatatcaccatattcatcaaccaccaggccgactttctttttattacgctggaatttcaccaattgcgtgctgagcggcgtaccttccggcacaaagtaaatctcatctgccgctcgtaacatgatctcttttgtgaactctttcttttccgtcatcagccgataggcttcacggacgcgcagcatgctgatggcatcgtccagcgaatcacgatacagcacgatacggccatgcggcgagtgggttagctggcggacgatagatttccagtcatcgttgatatcgataccgacgatctcattgcgcggcaccatgatgtcattaacgctgaccttttccagatccaggaccgacagcagcatgtcctgattccgccgtgagatttgtgaacgggattcattcacaatcgttcgcagttcatctttactcaatgcaccgctaataacgtgatcggtcttaatgcccatcatgcgcatcagtacgcgggtaatggtgttcaacagccacaccagcggcatcatcagtacctgtagcggcgccaaaaggaaactgctggggtaggcgaccttttccgggtacagggcggcaatggttttaggtaagacttcggcaaacaccagcacgacaaaggtgagcacgccggtggcgatagccacgccggcgtcgccgtacagacgcatgccgacgatggttcccagcgccgaggccaggatattgacgaggttgttgccgatgagcaccaggctaatgaggcgatccggcttacgcagtagcttttccacccgcttagccgggcggttgccttgtttcgccatatggcgcagccgatagcggttcagcgtcatcatgccggtttcggaaccggagaaataggcggagataatcaccatgatgatcagcgtgacgatcagcgtggtggtagaaatgtgttccaggagagactccttagtctttaactaacaaactgctgaaggacgcggctgccaaaataagccagggtcagcagcccggctccggcgacgttaaaccagaccacccggcggccgcgccagccttcgtggtagtgcccccacagcagtacgatatagacaaaccaggccacgatagacagcactgccttatcaatattttcggtattaaacaggttgtgcatatagaacaacccggtgcacagcgttagggtcagcagcacgacgccaacctgggtgatatgaaacattttacgctcaatactcatcagcggcggcatttcgctgctgaaagccagctttttatttttaagctgatagtcaatccacgccagctgcagcgcgtacagcgcggcgatgataagcgtggcgtaggcaaagagcgacaggccgatatgcaccaacatccccggggtggtttcgaggtgggtgatgtactcgttaggcacgaaggtggcgaaggcgaggttgatcagcgcaaacgcgtatacgatcggtagcaatagccagccgcgattacgcgaggcgacgatggtcatcaccgtacagatcatcaggctgaccagcgagccgacgttaagtaagctgagattttgcccaccttcgccgccggggaaaatacgtgactccagcgcgaaggcgtggcaaatcagcgctatcgtcgcggagagaatcgccatccgccgccagctgctgtttttttgcagcaagccagggatgatcagcgcaaggctgatggagtaggcgacaagggcaagtagagcaaacacaggcataggagcgtcgactgttgactaaataagaaagagaagcagtatagcgtcacgcgacgtctgctccaaccgttgcagcacattcaggtttatgtcgtgttatactgcgccaaattcgtatttttgtgtcgctgcggcgaccgaccgtttccacctcaggcgagagacaatgtttgataatttaaccgatcgtttgtcgcgtacgctgcgcaacattagcggccgcggacgccttaccgaagacaacattaaagacaccctgcgcgaagtgcgcatggcgctgctggaagccgacgtcgcgcttccggtggtgcgtgatttcatcagccgcgtcaaagagagcgcggtaggccatgaagtcaataaaagcctgacgccaggtcaggagttcgtcaagattgtccgcaacgagctggttgcggcgatgggcgaagaaaaccagacgttggatttagccgcgcagccgccggccgtcgtcctgatggcgggcctgcagggtgcgggtaaaacgaccagcgtcggtaagctgggtaaattcctgcgcgagaagcacaagaaaaaagtgctggtcgtttccgcagacgtataccgcccggcggcgattaaacagctggaaacgctggcagagcaggtcggcgtggatttcttcccgtccgacgttggccagaagccggttgatatcgtcaacgcggcgctgaaagaggcgaagcttaaattctacgacgtgctgctggtggataccgccggccgtctgcacgtcgatgaagcgatgatggacgaaatcaaacaggtccacgccgcgattaatccggttgagacgctgtttgtcgtcgatgcgatgaccggtcaggatgcggcgaataccgcgaaggcctttaatgaagcgctgcctttgaccggcgtggtgctgaccaaagtagacggcgacgcccgcggtggtgcggcgctgtcgattcgtcatatcaccggcaagccgattaaattcctcggcgtcggcgagaaaaccgaagcgctggaaccgttccacccggaccgtatcgcttcccgtattctcggcatgggcgacgtgctgtcgcttatcgaagatatcgagagcaaagttgaccgcgcgcaggccgagaaactggcatccaagctgaagaaaggcgacggtttcgacctgaccgacttccttgagcaactgcgccagatgaaaaacatgggcggcatggccagcctgatgggcaaactgccgggcatggggcaaattcccgataacgtgaaagcgcagatggacgacaaagtgctggtgcgtatggaagcgatcatcaactcgatgacgatgaaagagcgcgccaagccggaaatcatcaaaggttcgcgtaaacgccgtatcgccgccggttgcgggatgcaggtgcaggacgtgaaccgcttgctgaagcagttcgacgacatgcagcgcatgatgaagaagatgaagtcgaaaggcggcatgatgaagatgatgcgcgggatgaaagggatgatgccgccaggattcccaggccgctaaaaacaagggtataaggctatcttgtttgccattttagctccggggtgtgctcgaaatgctcacgtactacgtgtacgctccgctttctgcgcgcacgccggaactaaactagctgcaccgatatacgccttctatcccttgtttaatgctcagtaccaagatgctgattgcatttttcccagaaatcagtaaaattttcgggcttttaatatgacaccgggctccgttcctcgatggggcccggttgttttattcacacaagaggatgttatggtaactattcgtttagcacgtcacggcgctaaaaagcgtccgttctaccaggttgttgtcaccgacagccgtaatgcacgcaacggtcgcttcatcgagcgcgttggcttcttcaacccgatcgctaccgagaaagaagaaggcacccgcctggatctggatcgtatcgctcactgggttggccagggcgctactgtttccgatcgcgttgccgcgctgatcaaagccgctaacaaagcagcttaatctgtcacggtggtcatgatgagcaagcaacacaccgcacaagcacctgttgatccgattgtattggggaaaatgggttcttcctacggtatccgtggttggctcagagtgttttcctccaccgaagacgctgaaagcatttttgactatcagccctggttaatccagaaggcgggtcagtggcaggttgttgagctggaaagctggcgccaccacaatcaggacatcatcatcaagctgaaaggcattgacgatcgtgatgcggcgaatctcctgactaattgcgaaattatcgttgattcatcgcagctgccggcgctggaagagggcgactattactggaaagacctgatgggctgccaggtagttaccaccgaaggctatagcctgggtaaagtcattgatatgatggaaaccgggtcgaatgacgttctcgtcatcaaggcaaacctgaaagatgcatttggcatcaaggagcggttggttccgttcctcgatgggcaggttatcaagaaagtcgatctcgctactcgtactatcgaagtagattgggatcctggtttttaaattctccggataaacggtaaaagacggcgctatgtggattggcataattagcctgtttcctgaaatgttccgcgcaattaccgattacggggtaactggccgggcagtaaaaaatggcctgctgagcatcgaaagctggagtcctcgcgacttcgctcatgaccggcaccgtaccgtggacgatcgtccttacggcggcggaccggggatgctaatgatggttcaacccttacgggatgccattcatgcagcaaaagccgcggcaggtgaaggcgcaaaggtgatttatctgtcacctcagggacgcaagcttgatcaagcgggcgtcagcgaactggcaacgaatcagaaactgattctggtgtgcggtcgctatgaagggatagacgagcgcgtaatccaaaccgaaattgacgaagaatggtcaatcggcgattacgttctcagcggtggtgagttaccggcaatgacgctgattgactccgtttcccggttcattccgggagtactggggcatgaagcatcagcaacggaagattcctttgctgatgggttgctggattgcccgcactatacccgtcctgaagtgttagaagagatggaagtaccgccagtattgctgtcggggaaccatgctgagatacgtcgctggcgtctgaagcagtcgctgggccgcacctggcttagaagacctgaacttctggaaaacctggctctgactgaagagcaagcaaagttgctggcgcagttcaaaagcgaacacgcgcaacagcagcataaacatgatgggcaggcgtgagcccccaatatcagtttacccaggataagagattaaattatgagcaacattattaagcaacttgaacaagaacagatgaagcaggacgtaccttccttccgtccgggtgataccgtggaagtgaaagtatgggttgttgaaggttccaaaaaacgtctgcaggcattcgagggcgtggttatcgctattcgtaaccgcggtctgcactctgcattcactgttcgtaaaatttccaacggcgaaggcgttgagcgtgtcttccagactcactctccggtagttgacagcattgctgttaaacgtcgtggtgctgtacgtaaagctaaactgtactacctgcgtgagcgtaccggtaagtctgctcgtatcaaagagcgtcttaactaagattcgctttcgcgacatcctgatagaaagggctggccagatggctggcctttttttatctaaattttaactattttgatgtaaatcaattacaatatcgcccggatttcggaggggcggtgaacggcactattttttcacaatcagcattgcaacggcgggccgcctggctggcgctgtttgcgatcctgctgatcgtggtggcgccgctgatctccgtttcgctgcagaaagatcccatgagcgcaatgccgggcatgcatcatgctatgccgatgggcgcgtctcatgatgggatgtccggacatgtgatggtaatgatgcatggcgctgacagcgcgtcgcagccggcgcatagcatgccggtcgatcacgccgaagcctgcggctattgcgtgctattagcgcacgtaccggggctgctgttcgcgctggcgctgttcttcgccatgatcctgcggcgcattcggctgccggcttctcgcccggtattaaaacactggcactacttcccctggctctaccctgaaacccgcgcgccgccgcggctgtctgctttttccctttaataaaaatgaatctgcgtactgcgcaacgacctcttttgctttaaaaaaggaagagtatgacaacctgcacctcgcgcgcggcatggttaaacctgctgcggcgcctccatttctatattggtctgtttattggaccatttatctttgtcgcggccttgaccggcacgctgtatgtcgccacgccgcaactggaaaactggctgtaccatgaggccttacagggctcgctcaacggcgaaagacagccgcttagcgcgcaaattgccgtcgccaaagaggctacgcaaaacaacctccgcctgcaggccgtgcgcccaggtattaccgccggcgaaacgacgcgggtgatgtttgccgacccgcggctggggaatcagaaaaccgggctatttttgttgacccggtgacgctacgggtcaaaggcgatctgacggtttacggtaccagcggtattttaccgctgcgccagtggattgattacgcgcataaatcattgctgctgggcgacggcggcagactgtacagtgaactggcggcctcctggatgtgggttgcggcgttgggcggtattgcactatggacgatgacccgtccgaagcggcggatcaacaatcggctgcaaaatacccgccgtctgcacgtgacgctgggctggatgttactggtcggcatgttactgttttccgccactggcttaacctggtcgcagtgggcgggcggtaacgtcgataagatgcgctccgcgtttggctggctaacgccgcaggtcaatacgcaacttcagggcggggaggcgatgccgcccgatccgcacgccgggcaccacatggcgcatatggcaatggatgagccacaggtgaaagtgactgcggatcggttcgatagcgtattgcaggtggcgcaggccgcagggctgacggccagcaagctggagatccggccgccaaaaagcgcgggaatggcgtggacggtgaatgaaattgaccgtagctggccgacgcgggtcgatgctgtggccatcgatggcgagacgttacaagtcgtggatcgtacccgctttagcgattttccgctgatggctaagctgacccgttggggcgtcgattttcatatgggaatactgttcgggttggcgaaccagttgctgttggtggcgttcgggttggccctgtgcgttatgatcgtcgtcggctatcgcctgtggtggatccgccgtccggcgcaaagtgcgtttaatcctgcacagacgttggtgcaagcgtggctggggctaagtgtcgccgcccgggcgcttgcgctgctaatagcgctcctgctcgggctggcggtgccgctgatgggcgttagcctcgcggcgtgcctcgtggttgattacctgcgctggcgcgcggcttcagcgatgaggctggctaagtcggtagattaacgagcttaaggcgtgctgatcaccacggtaacgcggcggttttcagcacggcctgccgcggtatcgttgctggcgatggggtactttttacctaacccgcgggtggttagattactgcgcggaattttcgcgccttcagcccaggcatccgccacgctgttggcgcgctttaatgacagcgcttcgttgtagctgtcttcgccgtagttatcggtatgaccttcaagacggctgtgggtaataccggtttcagctaaccgtgcggccatactgtggatttgctgctggctgtcgggacgcaggcgatagtcgtttttgtcaaacagaatgctgtcagacaaacctaatgaccaatcaccggcggtttcggtaaagccgtaagacttcattgctgcgacctgttctttcgagaacttacctggcgcctggcacccagtgaggagaaatgcagccagaagagtgggtgcaataaattgcctgagcatagtaattccttcttatttttgtgtgtgatgaaaacgctggtttttcatccgatacatattctgatcggccagttcctgcagctcctccaccgaggtgtgttcccacgtcaaagcatagccaatactcagagagagcgttgccgtgtggccattgtggagattgaatggctgaagaaactgttcggacagcgttgcgcaaagcgcctggacttcggtttctgtatgcacatcgtgcagtaaaatggcgaattcatcgccgcccagacgccatgcttgatgctggtcgccaacgaatgccatcaggcggctggcgacctcaataaggactttatcgccggcggcgtgtccccagttatcgttaatgagtttgaaattatcgccgtcaagaaacagcagcgccgaactatgacgtgccgcgtcattgtccatcagcttaccgatgacgttgcgaaacgccgcgcgattcgccaatcccgttagtggatcatgcaacgagctgcgcagcagttgcgcatttttcgcctgcagttgacgctgccaatcttccatttcgccgagcaggctattgaagtcctgggcgaagagatggaattcctcaatacgttcttccggtacacggcgcgagaaatggcggttttcgcggatatcatgtaccacttcggtaatactttgcagcgcggcgacaataccgcgatgcagagaatgggtgagcatcagggcgataacggacgccagcagaatgctgccggtcaatacgatcagcgaagtaccgagaaaatgactgattaaccgatcgagcgccttcagacgaagctcaccgattattttcccctgatgccagattggctggacagtcggttcaggaaacagccatttactaatataaccactgaatttttcgtttttaactaaggcgtcattacgccagtcggcgaaatgacgctgatggctgtccagaagcgtggcttcggaaaattgcccctgtctgccaagcgtcgccagcgtatcctctgcggcggtggcatcgccaaaaaccagtgccgcttcgaggctgcggcccatggttgccgcggtgagctcaagatttttttgcgcgtactgttttaacgtgatgacggaggcggcgctgagcaaaagccagaccagcgtcatcgaaatcactacgcttatcatgctgattcggcgtaacgcgtttttgaaagtggggcgcggggcctgagaaaaatccttattcatgtgatttcttccgggcaagcatcagtacgtccggattgacccgtacaccgctatgcgtcaggacatccagattaacggaaaacctcaccctatcgtcatttatgagcaagcaaaaagcgctgccaaaagagcaatcggtattttgttccgctatgagtaatagaggacgggagccatatttttttgttaatgcagactgctgatccggggtttcactgccgaaatacaaaccgtcgcagctggcctttagggcttcctgtgaatttcgaactatcaccggttgataaggtaaattttccggcgcttcctgagccaaactgcggatatatcgggaggtggaaaaaacgcataacttcggcgggccggataaatttggccagcgcgtataagtcacaatccccgaaactatggcgcgaacgttctcagatgtctcagcggcaatagcgggaactcccgcgatgagcaaaaagaaaagcaaaaatagacggtaaaactctttcattaacgggtccgtcaaatcgttattgcacgggaaacgcagttcgcagttgcctgagcggagaatagcattattggcaaaaagcgtcattagctgccccggccgctttgagataatccttaccaggaattttagtaaaggaatgagtaaagcgcggcggcaaaaagatcctttctccatgtgtacatttatatgaacacttttctggcaatcaggtgctaattattttgctgttgtaaagtaatgtttacgtaatatggattgatatctttactttatatggtatggttacgtcatgcccgctgaggcaacgactatcgcaaacgagctatacaggatcgccatcatgcaaaaagacgcgctgaataacgtacatattaccgatgaacaagttttaattaccccggatcagttgaaagccgaattcccgttaaccgtggagcaggaggcgcagatcgcgcactcccgtcagacaatttccaacattattgccggacgcgatccgcgtctgttggtggtctgcggtccttgctcaatccacgatccggaagctgctatcgaatatgctcgtcgatttaaagcccttgccgcagaggtcagcgatagcctctacctggtgatgcgcgtctattttgaaaagccacgtaccaccgttggctggaaagggctgattaacgatccgcacatggatggctcgtttgatgttgaaggcggtctcaagatcgcgcgtcgtttgctggttgatttggtcaatatgggcctgccgctggcgacagaagcgctggatcctaatagcccgcagtaccttggcgatctgttcagctggtccgccatcggcgcgcgtaccaccgaatcgcagactcaccgtgaaatggcatccggtctgtcgatgccggttggttttaaaaacggtaccgatggcagcctggcgacggcgatcaacgccatgcgcgccgccgcgatgccgcaccgattcgtcggcatcaaccaggcaggccaggtttgcctgctgcagacccaggggaatcctgatggtcacgtcattctgcgcggcggtaaagcgccgaactacggcccggaagacgttgagaagtgcgaaaaagagatggcacaggcgggactgaaaccgtcgctgatgatagattgcagtcatggtaattccaataaagactaccgtcgtcagccggcggttgcggaatccgtcgtcgcgcagatcaaagatggcaaccgttccatcattggcctgatgattgagagcaatatccacgaaggcaatcagtcttctgagcagccccgttgcgatatgaagtacggcgtatccgtcaccgatgcctgcatcagctgggaaactaccgatgcactgctgcgcgagctcgatagcgatctgcgcggtcatctggcggcacgtctgggttaagaggattgtatggttgctgaactgaccgcattacgcgatcaaattgatgaagtcgataaggcgctgcttgatttgctggcaaagcgcctggagctggtggcggaagttggcgaggttaagagtaaatatggcctgccgatttacgtaccggaacgcgaagccgcgatgctggcttcccgacgggaagaggcggcggcgctcggcgtgccgccggatcttatcgaggatgtcctacgtcgggtgatgcgcgaatcgtattcaagtgaaaacgacaaaggcttcaaaacgctgcatccgaacctgcgcccggtggttattgttggcggcggcgggcagatggggcgtctgtttgagaagatgctgacgctgtcaggctatcaggtgcggatactggaaaaagaagactggccgcgggcgacagagattgtcgccgatgccgggatggttatcgtcagcgttccgatccataccacagcagagacgatttcgcgtctgccgccgctgccggcggattgcattctggtcgatctggcttccatcaaagccgagccgctgcaggcgatgctggcggcgcataacggcccggtattgggattgcacccgatgtttggtccggatagcggcagcctggcgaaacaggtagtggtttactgcgatgggcgtcagccagaagcgtaccagtggttccttgaacagattcaggtctggggcgcgcgactgcaccgcatcagcgccgttgagcacgatcagaacatggcatttattcaggcgttgcgtcactttgccactttcgcctatggcctgcatctggccgaagagaatgtccgccttgagcaactgttggcgctctcttcaccgatttatcgactggagctggcgatggtggggcgtctgtttgcccaggatccacaactgtatgccgacatcattatgtcgtcagaaaataatctggcgttgattaagcgttactaccagcgtttcggcgaagcgattggcctgctggagcagggcgataagcaggcgtttatcgacagcttccgtaaagtcgaacactggtttggcgattacgcccagcgcttccagagcgaaagccgcacgctgctgcgtcaggcgaatgataatcgacagtaagtctgctaaacgtgtatacaataaagccagaggggtaacccgctggctttttttatagggatgaaaagatggcacaaccgcaaccgctgtttgattacgtcgggcacctgccggaatgcccaacctggagcgatgccgagcaggcactgtactgggcggatattctggagtgcgaaattcaccgctacgatacacgcagtaaagaacaccaggttctgcaatttcccgaagaagtgggctgctttgctctacgcgagaagggcggttttatcgtcgccttacgtagtggtatctggctttgtgatgcccgcggtctgctgcaacgcaaaatctgtgataacccaagtaatccggatttggcacgctttaacgacggcggtaccgaccgggatggccgtttttacgcaggcaccttctgggggccgggagattacaatggcgcgctgctggtgcgtattgataacgacctgacgccaaaggtggtgcagtgtgatattcatggtgctaatggtctggcgtttagcgacgataagcgctggatgtatacctctgatacgccgaacgcggtgatttaccgcacgccgctggatgagcagggcgagccgggcatacgggaagtacttcgtcgtttccatccgggagaggggatacctgacggtgcggcggttgatgaagaaggctgttactggagtgcgatgttcgacggctggcggattgcccgtttttcgccgaacggagaacaactggaagagtatcgcttgccggtgcgttgccccacgatggtgtgtttcggcggcgcggatatgaaaacgctctatatcactaccacccgggaaaatatggacgctgacgaagtggcgcaatatccgctttccggcgccatcttcaccctgccggttgcggtggcagggatgaagaaacggcaatttattgaacgttaagccgggtcgaccggcacgacgttttcgctcgggtaacagcccagtactttcatcgaacgggtaatttcggccagctcttttaaagctttacgtagggaaagggattccaggttggcctgaatatccagataaaacatctcttcccacgggttaccgtggattgggcgcgattccagcttgctcatgatcaggttgtggttgcgcagcaccagtagcgcttcaaccagcgcgccagcctgttggccggtggcgattaacagcgtcgttttcgccggcacctgatcggatacgttcactgctttacgcgccagtaccaggaaacgagtgatgttttgcgtctggttagcctggcagtgctccagcacctgcagcccgtacagcgcgccgcctgcctcgctacccagtgcggcaacggtgggggattttgcctgcgcgaccttttccatcgccgccgaggtgctctcggtgtactcgattttccagtgcggatagcggcttaaatactggctgcactgctggaacggctgcggatggctataaacggtcttgatcttatcggcgtccgttgaggacgaaacgagcacacagtgatcgattggcagcgtcagttcgccgacgatcgacagactggtatgctgcagcagatcgtacacatcgttgatcccgccggagctggtgttttcaatcggcacaacggcgtaatcggcctgaccggtttcgacctgctcaaagatatcggcgaatttcgcgcagccgctttcgataaattgctcaaaatgacgcgcggcgtactggcgcgcggcaagatgtgagtacgagcctttaggtcccaggaaggcgatacgcgcggagtgggggttaatcttattaagatgctgctgcagtagcgcctgctgggtaagaacggagtcttcaataatcagctggaacaggcgggtaatgtagtgggcgtccagatgatgctttttgccaagcgtcattaaacgctccagcaggtcgcgttcgcggtcgatatcgcgtaccggacggtgcgattccagcttcgctttcccgacctccaccgccaggccgcggcgttcggccagcagcgcgagcagtttttcatccagggcgcttattttgtcgcgcagggccagtaatgggttttcctcggtcatgattgtgttgcctttcttgttatcaataaaaaaggcctcccgcgtgggaggccttgttattcgtcttcgcattctttcttatacgacgaaccgcctcccagtcaggggaaggtaaaaaagaatgcgaagaagaacgggagtagtttcacgatgaattccttaggttagtgtggattacagtacctgtactgttttcatcctgtcaattaaaaaacgaaaaacgcgcccgaaggcgcgtggcatgacacaacttaagttaaggattactcttcttcttccacaaagcctgcctctttcaccgatgtggcggcgcggcgggcttcccctttgtgttgcactttattcagctgccgttccagcttgttgatcaattcgttaatggcggcgtacatgtcttcatgacgcgcgctggcaaccagatgaccgttcggcgtattgatggttgcgtcagcaataaaaccctgcggctccttagagagaatgatgtgcgggttgattaaatgagtttgccacttatccagtttggcgagacggtctgcgacatgctggcggattgccggagtaatttccatttgtttactggtaatgttcattgtcataaattttacctcttgtctttcccgtcttggtgaacccagcatacctcgcctaatgtcaaaatgtgtgatctaaatcacatttaaatgtcactttttgtcaacgaattcattttgtgagacaggacaggaacggatgagattttacttgtcgaaatgaagaaagggggccatatttgatgagttaactcggcgctaaaccgcttcagcgctggtgttcattgaataaaaaacggcagcccaggggctgccgttttgctttctgtcatcaccctcaggtgtttttgccgttggcggcgatgattttggcgactttgtcagcctgcgcgttcatttgcatctgacgataggcgttttccatcttcggcaacgcatcgcgagtggcctgcgtatccgggtagttacgcagcataccgtcaacgcggttcacgacggcaacccaggcgccgcggtcggtgtaataatccaccaccgacagctcatacttcgccagacggtctttcaggaacaccaggcgtttgtaagcgtctgtggcgtactggctgttcggataaccgcgaaccagcttcgagaaatcattgaatgcgtcgcgagcgtgctgcgggtcgcggtcggaacgatcgacgccgaagaagccctgcagagcgctgtcatcgagggccatgttagtcaggccgcgcatatagatgacatagtcaatgttgggatgcgtaggattcagacgaacgaaacgatcgattgcggcctgagccagcggcaaatcggcatttttgtaatacgcataaatcaggtccaactgtacctgttgggagtaaggaccaaatggatagcgattatccaacgcttccagttgcgttattgcctgtttccagttaccgtcctgcaacttttgctgggcggtcgcgtaaatttcattcggcggattatcaggcacctcctcctttgagccagagcaacccaccaaagccaggctcagtgtggctgctgccaccaggtatttcatgcgcgtcatgacgttttgacttcctcaaaatgtttatgcgggagaatctctgttcctgctcccgattaagaccagctacaatagcacactatattaaacggcaaagccgtaaaacccaacgttaaacgaagaagctgtatatggcacaacgagtacaactcaccgcaacggtgtccgaaaaccaactcggtcaacgcttagatcaggctttggccgaattgttcccggattattcacgttcgcggataaaagaatggatccttgaccagcgcgtgctggtaaacggcaacgtcatcgacaagccgaaagaaaaagtttttggcggcgaagccgtctctatcgatgttgagatcgaggaagacgtgcgttttgaaccgcaggatattccgctcaatatcgtctatgaagatgacgacatcctggtcatcaataaaccacgtgatttggttgtgcaccctggtgcgggcaaccctgacggtactgtgctgaatgcgctgctgcattactatccgcccattgccgatgtccctcgcgcgggtattgttcaccgtctggataaagataccaccggcctgatggtcgtggcgaagaccattccggcgcaaacgcgtctggtcgagtcactgcagctgcgcgaaattacccgcgagtatgaggcggtggctatcggccacatgaccgctggcggtacggttgaagaaccaatcagccgtcatccgaccaagcgcacgcatatggcagttcacccgatggggaaaccggcggtgacacattaccgcattatggaacatttccgtatccacacccgtttgcgcctgcgcctggaaactggccgtacgcaccaaatccgcgttcatatggcgcatatcacccatccgctggtgggcgatcaggtttacggcggccgcccgcgtccgccgaaaggggcatcggacgaattcatcagcgcgctgcgcaaattcgatcgccaggcattgcacgccacgatgctgcgtctgtatcacccaattaccggtattgaaatggaatggcacgcgccgatccctcaggatatggtggaactgatcgacgccatgcgcgccgattttgaagcccataaggacgatattgactggttatgacaaagctgattgttccgcagtggcctatgccgaaaggcgtggcggcctgtagttctactcgtgtgggcggcgtgagcctgcctccgtatgattcgttgaaccttggcgcccattgcggcgacgatctcctgcatgtcgaagaaaaccgccggcggatgtttgccgctggcggattaccctcttatccggtgtggctggagcaggtgcatggcaccacggtactaaaattggatggcgggccgtacgtgtcaaaacgcgccgatgcgtcatactgtaataagccgggtaccgtttgtgcggtgatgaccgcggactgcctgccggtgctgttctgtaaccgcgccggaaccgaggtggcggcggcgcacgccggatggcgcggcttatgtgaaggcgtactggaagaaacggtcgcctgctttaatgataaaccggaaaatattctggcctggcttggtccggcaattggtcctgaggcgtttgaagtcggtgcggaagtgcgcgaggctttcatcgccaaagatgcccaggcggagagcgccttccgtcctgccggtgaaaaatattttgctaatatctatcaattggctcgtcagcgcctggctaacgtcggcgtggagcagattttcggcggcgatcgttgcactctaagtgaaaaggatgattttttctcttatcgtcgcgacaagactacaggtcgtatggcaagtttcatttggctgatataacctagagaatcaagacgatccagaaggcaaacttatttttcacatagttcaggtctttaaccttgaataattgagggatgacctcatttaatctccagtagcaaatttgacctgtttatgggaggagttatgcgtctggatcgtcttactaataaattccagcttgctcttgccgatgcccagtcgctagcacttgggcacgacaaccaattcatcgaaccacttcatctaatgagcgccttgctgaatcaggaaggggatcggtgcatcctttattaacctcggcgggtgttaacgccgtggcgttacgcagccaaatcgaacaggcgctaagccgtttaccgcaggtagaaggtaccggcggcgacgtgcagccgtctcaggatctggtgcgtattctcaatctttgcgacaagctggcgcaaaagagaaaggataactttatttcgtcagaactgttcgttctggcggcgcttgaatcgcgcggtgcgctgaccgacctgctgaaatctgccggagcaacaaccgccaatgtgactcaggcgattgaacaaatgcgcggaggtgaaagcgtgaacgatcagggtgccgaagaccaacgtcaggcattgaaaaaatttaccgtcgatctgaccgagcgggccgaacaaggcaaactggacccggtgatcggccgtgatgaagagatccgccgtaccattcaggtacttcagcgccgtactaaaaacaacccggtgctgattggtgaacccggggtgggtaaaacggcaatcgtcgaaggactggcgcagcgtatcgtcaacggcgaagtaccagaagggctgaaaggccgtcgggtattggcgctggatatgggcgcgctggtggccggggcgaaatatcgcggtgaattcgaagagcgtctgaaaggtgtgctgaacgatctggcgaaacaggaaggcaacgttatcctgtttatcgatgagctgcacaccatggtcggcgcgggtaaagccgacggcgcgatggatgccggcaacatgctgaaaccggccctggcgcgcggtgaactgcactgcgtcggcgccaccacccttgacgaataccgccagtacattgaaaaagacgccgcgctggaacgtcgtttccagaaagtgtttgttgccgagccgacggtagaagataccatcgcgattctgcgcggtctgaaagaacgttatgaactgcaccaccacgtgcagatcactgacccggccatcgtggcggcggcgaccctgtcgcatcgctatatcgccgaccgtcagttgccggataaagccatcgaccttatcgatgaagcggcatccagcatccgtatgcagatcgactcgaagccggaagagctggaccgtctcgatcgccgtatcatccaactgaagctggaacagcaggcgctgaagaaagaagcggatgaagcgagcctgaagcgtctcgatatgcttaatgaagagctggcggacaaagaaagtcagtattcggtgctggaagaagagtggaaagcggaaaaagcatcgctctccggtacgcagactattaaagctgagctggaacaagccaaaattgccatcgaacaagcacgacgtcttggcgacctcgcgcggatgtccgaactgcaatacggtaaaattccggagctggaaaaacagctggcggcagccacccagtctgaaggcaaaacgatgcgcctgttacgtaacaaagtaaccgatgcggagattgccgaagtgctggcgcgctggaccggtattccggtggcgcgcatgatggaaagcgagcgcgaaaaactgctgcgtatggaacaggatctgcatcaccgcgtcattggtcaggatgaagcggttgaagcggtatctaatgcgattcgccgtagccgcgccgggttgtctgacccgaaccggcctattggttcgttcctgttcctcggcccgaccggggtgggtaaaaccgagctttgcaaaacgctggctaactttatgttcgacagcgacgacgcgatggtgcgtatcgatatgtccgagtttatggagaaacactccgtctcgcgtctggtcggtgcgcctccgggatacgtgggttatgaagagggcgggtatctgaccgaagcggttcgtcgtcgtccttattccgtcatcctgctggatgaagtggaaaaagcgcatccggatgtatttaacattctgctgcaggtgcttgacgatggccgcctgaccgacgggcaggggagaacggtcgacttccgtaatacggttgtcatcatgacctctaacctcggttccgatctgatccaggaacgttttggcgagctggactacggtcatatgaaggatctggtgcttggcgtggttagccagcgcttccgtccggagtttatcaaccgtattgatgaagtggtggtcttccatccgctgggtgaaaaacatattgcttctattgcgcagatccaactgcagcgtttgtataaacgtctggaagagcgcggctatgaagtgcatatgtccgatgaggcgctgaagctgctgagcgaaaatggctacgacccggtatacggtgcgcgtccattgaaacgagctatccagcaacagatcgagaacccgttagcccagcaaatcctgtctggcgagctggttccgggtaaaaccgtcgagcttgtggtgaaagacgaccgtatcgtggcagtgcagtaaatcacaaaacgacaaaaacgggccctctgggctcgtttttgtttaaaaaccaggcaagaattaaagtctaaacgttaatttggttgaaaagtgagcgcttaaattgtttttttgaatttatgcttgtcacttcaaaattaccccctataatgcgccaccactgacacggaacaacggcaagcaagccgccgggtcagcaggctttcaacgctgaaattcaacgctgaaagctgacagagaaaagcgaaataagcgcttgactctgaatgaggaaaacgtattatacgggacctcgcaacggtgagcgaaagccgcgttgcagctgctctttaacaatttatcagacaatctgtgtgggcactcaaagtgacatgggttcttaatgtcttcggacaataaatgaataccaagtctctgagtgaacatacgtaattcattacgaagtttaattcacgagcatcaaacttaaattgaagagtttgatcatggctcagattgaacgctggcggcaggcctaacacatgcaagtcgagcggtaacacagagagcttgctctcgggtgacgagcggcggacgggtgagtaatgtctgggaaactgcctgatggagggggataactactggaaacggtagctaataccgcataacgtcgcaagaccaaagtgggggaccttcgggcctcatgccatcagatgtgcccagatgggattagctagtaggtggggtaatggctcacctaggcgacgatccctagctggtctgagaggatgaccagccacactggaactgagacacggtccagactcctacgggaggcagcagtggggaatattgcacaatgggcgcaagcctgatgcagccatgccgcgtgtatgaagaaggccttcgggttgtaaagtactttcagcgaggaggaaggcgttaaggttaataaccttggcgattgacgttactcgcagaagaagcaccggctaactccgtgccagcagccgcggtaatacggagggtgcaagcgttaatcggaattactgggcgtaaagcgcacgcaggcggtctgtcaagtcggatgtgaaatccccgggctcaacctgggaactgcattcgaaactggcaggctagagtcttgtagaggggggtagaattccaggtgtagcggtgaaatgcgtagagatctggaggaataccggtggcgaaggcggccccctggacaaagactgacgctcaggtgcgaaagcgtggggagcaaacaggattagataccctggtagtccacgccgtaaacgatgtcgacttggaggttgtgcccttgaggcgtggcttccggagctaacgcgttaagtcgaccgcctggggagtacggccgcaaggttaaaactcaaatgaattgacgggggcccgcacaagcggtggagcatgtggtttaattcgatgcaacgcgaagaaccttacctactcttgacatccagagaacttagcagagatgctttggtgccttcgggaactctgagacaggtgctgcatggctgtcgtcagctcgtgttgtgaaatgttgggttaagtcccgcaacgagcgcaacccttatcctttgttgccagcggttaggccgggaactcaaaggagactgccagtgataaactggaggaaggtggggatgacgtcaagtcatcatggcccttacgagtagggctacacacgtgctacaatggcatatacaaagagaagcgacctcgcgagagcaagcggacctcataaagtatgtcgtagtccggattggagtctgcaactcgactccatgaagtcggaatcgctagtaatcgtagatcagaatgctacggtgaatacgttcccgggccttgtacacaccgcccgtcacaccatgggagtgggttgcaaaagaagtaggtagcttaaccttcgggagggcgcttaccactttgtgattcatgactggggtgaagtcgtaacaaggtaaccgtaggggaacctgcggttggatcacctccttaccttaaagaacctgcctttgtagtgctcacacagattgtctgatgaaagtaaagaagcaaggcgtcttgcgattgagacttcagtgtccccttcgtctagaggcccaggacaccgccctttcacggcggtaacaggggttcgaatccctaggggacgccacttgctggttcgtgagtgaaagacgcgtgccgatatatctcaaaactcatcttcgggtgacgtttgagatatttgctctttaaaaatctggatcaagctgaaaattgaaacgacacacagttaatgtgtgttcgagtctctcaaattttcgcgacacgaaaatgttttacgaaacatcttcgggttgtgaggttaagcgactaagcgtacacggtggatgccctggcagtcagaggcgatgaaggacgtgctaatctgcgaaaagcgtcggtaaggtgatatgaaccgttacagccggcgatgtccgaatggggaaacccagtgcaattcgttgcactatcgttaactgaatacataggttaacgaggcgaaccgggggaactgaaacatctaagtaccccgaggaaaagaaatcaaccgagattccccagtagcggcgagcgaacggggagcagcccagagtctgaatcagcttgtgtgttagtggaacggtctggaaagtccgacggtacagggtgatagtcccgtacaccaaaatgcacaggttgtgaactcgaagagtagggcgggacacgtggtatcctgtctgaatatgggggaccatcctccaaggctaaatactcctgactgaccgatagtgaaccagtaccgtgagggaaaggcgaaaagaaccccggcgaggggagtgaaaaagaacctgaaaccgtgtacgtacaagcagtgggagcaccctttagggtgtgactgcgtaccttttgtataatgggtcagcgacttatattctgtagcaaggttaaccgtataggggagccgcagggaaaccgagtcttaactgggcgttaagttgcagggtatagacccgaaacccggtgatctagccatgggcaggttgaaggttgggtaacactaactggaggaccgaaccgactaatgttgaaaaattagcggatgacttgtggctgggggtgaaaggccaatcaaaccgggagatagctggttctccccgaaagctatttaggtagcgcctcgtgaactcatcttcgggggtagagcactgtttcggctaggggtcatcccgacttaccaacccgatgcaaactacgaataccgaagaatgttatcacgggagacacacggcgggtgctaacgtccgtcgtgaagagggaaacaacccagaccgccagctaaggtcccaaagtcacagttaagtgggaaacgatgtgggaaggcacagacagccaggatgttggcttagaagcagccatcatttaaagaaagcgtaatagctcactggtcgagtcggcctgcgcggaagatgtaacggggctaaactgtgcaccgaagctgcggcagcgacactatgtgttgttgggtaggggagcgttctgtaagcctgcgaaggtggcctgtgagggttgctggaggtatcagaagtgcgaatgctgacataagtaacgataatgcgggtgaaaagcccgcacgccggaagaccaagggttcctgtccaacgttaatcggggcagggtgagtcgaccctannnnnnnnnnnnnnnnnnnnnnngatgggaaacaggttaatattcctgtacttggtgttactgcgaagggggacggagaaggctatgttagccgggcgacggttgtcccggtttaagcatgtaggcggaggttccaggtaaatccggtaccttattaacgctgaggtgtgatgacgaggcactacggtgctgaagtaacaaatgccctgcttccaggaaaagcctctaagcatcaggtaacattaaatcgtaccccaaaccgacacaggtggtcaggtagagaataccaaggcgcttgagagaactcgggtgaaggaactaggcaaaatggtgccgtaacttcgggagaaggcacgctgatatgtaggtgaagcccctgcgggtggagctgaaatcagtcgaagataccagctggctgcaactgtttattaaaaacacagcactgtgcaaacacgaaagtggacgtatacggtgtgacgcctgcccggtgccggaaggttaattgatggggttatccgtaaggagaagctcttgatcgaagccccggtaaacggcggccgtaactataacggtcctaaggtagcgaaattccttgtcgggtaagttccgacctgcacgaatggcgtaatgatggccaggctgtctccacccgagactcagtgaaattgaactcgctgtgaagatgcagtgtacccgcggcaagacggaaagaccccgtgaacctttactatagcttgacactgaacattgagccttgatgtgtaggataggtgggaggctttgaagcgtggacgccagtctgcgtggagccaaccttgaaataccaccctttaatgtttgatgttctaacgttggcccctgatcggggttgcggacagtgtctggtgggtagtttgactggggcggtctcctcccaaagagtaacggaggagcacgaaggttagctaatcctggtcggacatcaggaggttagtgcaatggcataagctagcttgactgcgagcgtgacggcgcgagcaggtgcgaaagcaggtcatagtgatccggtggttctgaatggaagggccatcgctcaacggataaaaggtactccggggataacaggctgataccgcccaagagttcatatcgacggcggtgtttggcacctcgatgtcggctcatcacatcctggggctgaagtaggtcccaagggtatggctgttcgccatttaaagtggtacgcgagctgggtttagaacgtcgtgagacagttcggtccctatctgccgtgggcgctggagaattgagggggctgctcctagtacgagaggaccggagtggacgcatcactggtgttcgggttgtcatgccaatggcattgcccggtagctaaatgcggaagagataagtgctgaaagcatctaagcacgaaacttgccccgagatgagttctccctgactccttgagagtcctgaaggaacgttaaagacgatgacgttgataggtcgggtgtgtaagcgtagcgatacgttgagctaaccgatactaatgaaccgtgaggcttaaccttacaacgccgaagctgttttggcggatttgagacgattttcagcctgatacagattaatcgatgcgtcctgaggacgtgttgaaaacagaatttgcctggcggcgatagcgcggtggtcccacctgaccccatgccgaactcagaagtgaaacgccgtagcgccgatggtagtgtggggtctccccatgtgagagtagggaactgccaggcatcaaataaaacgaaaggctcagtcggaagactgggccttttgtttttgtgttttgtggccagacacgatggcacccccggtggcgctgcgcttaccggggctgccgatcgttccccggcctgcgccgcctgcgggaaaatctcgctacaccacctcatcactttcattcaaagccatataaaaccccgtcgttgtaaccacttcgccataattcactttttcactgctcatgtgctgacgttaatcgcgaaaaccggtgttacgaaaaaaaatgtgaatacaatcacatataaataaataacaattatataacatttggttcactaattaatttgtctgagtgacgtgtcacgcccgatgagacagattacggtctttgctggagcaaaattataatgacagaaagtagcattaatgagcagggtgccctggagcagagcgatacccggcgtcgtgtatgggcaattgtgggtgcatcttcagggaacctggtggaatggtttgatttttatgtctactcattttgctcactctattttgcgcacatcttcttcccttcaggaaataccaccactcaattgttacaaacggccggagtttttgccgctggcttcctgatgcgccccatcggcggctggctatttggccgcattgctgaccgtcgcggacgtaaagcctcaatgcttatttcggtatgcatgatgtgcttcggctcgctggtgattgcttgtctaccgggatacgccactatcggcacctgggcaccggcactgctattgctggcacgtctgttccagggcctgtccgttggcggtgaatatggcaccagtgcgacctacatgagtgaagtcgcagtagaaggaaagaaaggattctacgcctccttccagtacgttacgttaattggcggtcaactgctggcggtactggtcgttgtcgcactacagcaaattctcagtgatgaagacttgcgcgcctggggatggcgtattccttttgcgctgggggcagtactggccatcgtcgcgctgtggctgcgtcgtcagttggatgaaacctcgaagcaggaaacccgtgcgctgaaagaggccggttcctttaaaggtttgtggcgtaatcgccgggcttttgtcatggtgctgggctttactgccgccggctcgctgactttttacaccttcaccacgtatatgcaaaaatatctggtgaataccgccggcatgtcggccagcaccgccagcatgattatgacggcggcgcttttcgtgtatatgctggtacagccgctgtttggcgcattctcggataaggtggggcgccgcacttcaatgctgtgtttcggcgtgctggcgacgctgtttaccgtgccaattttgagtgcgttgcagaatgttagctcgccgtatgccgcatttgtgctggtgatttgcgcattgctgatcgtcagtttctacacctccatcagcgggatcctgaaggcggaaatgtttccggcacaggttcgcgcgctgggcgtgggcctgtcctatgcggtagcaaacgcgctgttcggcggttcggctgaatacgtcgcgctgtcgcttaaatctgcgggaatggagaatgccttctactggtacgtgacggtaatggcggcgattgccttcctggtctccctgatgctacatggtaaagggaaggggttgcgtttgtaaccttattgatgcgccagttgccacaccgtatagccggtggtggcgccggcgacatcccaggcgaaatccttccagctccagccgctccctgccgggcggctgtcccataactcttttgatgccccagactaacggaaaacatcagaccgatggcggcgctgcgatcgcggctgtatccctgatgctgcgcatattcattgccggcggcggagagcattgccgacgcgagaaagtgttgggccttgtcctgaccgctccaggcatcattggccatatggctgcagccgctaagtagtaaaggggcaataatgacgaagtagcgcataattcttcctgaaaaaaagccccggattacggggcgttgatcttagagaatgcggctgatgaggcggtcgatgcggatgcgccgcagacggcggatgagctttttcaccttcaccggatagtcggcgatgctttgcagatcgcgatagtgcttcactaccgtcgtatgtgtacggatgagctgaagctccttttcccgcatttcgcgcagttgatgcttaggatcgtggatcagcacggcattttctaagtccagccgccaggctcgcggattgaggttgttgccggtcagcagcatccattcgttatcaacccacatgccttttagatggtagctgttatcgtcatctttccataaacgcacgatgagctgatcggtattcacataatactgcagacggctcaggaagcgacggagattaatttcgtacaaataaggcaatgcgccgatgattttaaacggctgatcttccgggatatagaagtcgttcgctgtcttgtcgccgacgatgatttccacttttttgccgctgcgtagcagagaaataatatttctgaccagtacggcgggcaggttgaaatacggggtgcagatggtcagcttatgttccgcacacggcatcaggtggaagatagtcttattgagcagactcgatttaccgagcccgaccagcggtgtgactgacagttgatcttcatcggcattgccggtgaagtgatagccgctttcgcgcagatcctggcgatactggcgaatgtcattttttatttccgggctttttggtcgatccgggcgatcgagtcgattcacgccgcgaccctgtaccagattctgctcgacccagtcgaacatcacgtcggccatcttgccattgcgaatgcactgatagcgatcgtagcgatatttatcatgctgatgcaggtatacatcgttcaggctggcgccgctatagataacgctatcgtcgataatgaagcctttaaaatggagcacgccgagcgcttccctggtattgaccgggacgccatacaccgggatatcaatccctgggttttcctgggccatgcgacagtaccaatcggcattggtattagaggctgccgcgccgatgcggccacgctgggcgcgatgccagtcaaccagcacgcgcacatccagttctggacgctggcgtttagcgtcatacagggcttgcagtattccttttccgccatcatcttgctcaagatagagcgcaataatgcaaatacgctgggtggcgtgggctatctttgccagtagcgcctggcggaaatcagcaggcgcgtaaaagaactcgatatcatcaactgactgagagagcttagggagttgggcaaggtgttgttgatgtttattacgcttaaattttgacaacatcacagtgcgtttcttctctgtttattgaagggtcttctgtaccatgcagacgacgtaagcgggcaataataccattactacccgcgaatgtggtcattaattgctgccgcttgtcaccgaatgtaacgtattcagcgcaagagacaggctcacaattccgtcttctaactggatatccactgcgaaaccaagctttctggcaaggccaatcatgccgcggttatttggcatggtgatgccatttaagcgctgtaatccatggctctgcgtataggcgatcagtttttcaaggagttgtcgaccaaggcctagacctttcaggtccgaacgcaccagcacggcaaactcggcatcaatattatcaggatcggaaatcgctctggtcacgccgaggatctcgcttccttgctccgtggcgcgaaccgcaacaaaggccatttcacgatcgtagtcgatctgcgtcatattggctaagtcgtcatgggtgaattcgttgatctcgctgaagtagcggtaatagagatcttctttggtgacctgttcgataaaagccaataatagaggctcatcctcaggcaagatcggccggaataagcagcgttcaccgtttttcattactacccattcttctaactgttgcggatagggtctgaccgccagccggctttcgctgtcgccgctaaatggcgccaggctgagggtgacgtcgagggcggtaaactcgtttccggaagcaagcaaggggtgaatatccaaccgctggatctcgggacaatcgacgatcaggttagagacctgcaccagcagttggctgagtccgggaatatccagcgggcgaagcgcgctgcgtccgcggatctttttgctcttgatggcctggatcaccagataacgcgccaggttcatattcagcggcggcagggcgaccgcggcctgattttccgctcgccattcgacgccgccctcgccaagcataatcagcgggccaaaaagcgggtcatgctcgacgacgacccgtaattcctgcgccccggcgcggttggccatactctgtaccaacaggccatgaatgcgcgcctgcggccaggccatttttacccggtcaataatcgcgtccgccgcctgctggacttcagttggggtacgtaaatagagcataacgccctgaacttcagatttatgcggaatatccggcgaacgtaacttcaacgccaccgggtagccaatctgctcggcgatatgtaccgcttcggcgctgtcggcggcaatccaggtgggaagagtatggatgccgtacgcgcgcagcaccgggctgacttcatgggtgtccagagaggtcgcgccttcgctcagcgcgcgctgcaacagcgtgtgggcctccgcggtattggcggttaacgtatcggacaataccggcgtttcccgtagctgtttctggttgcgacggtattccaccatatgcataaaggcggtaatagtgccttccggcgtgcgataggttgggataccggcctcgctaaacaaccgtcgcgcctcctgggaagagtactccccgcaccagtttgtcagaaccgtgacgtatttcccgcgaggatgacgcttaagcgcatcaatcaacgccagcgcgctttcggtacccggcgccgcggcgctgggggagtggatcaccagcagcgcatcataatcctggctgtccagcaacacattcagcgccttgagataatgatcgctgctggcgtcatcacgcagatccagggggttagcaacctcgacgcctgtcggtaacgcctgcctgagctggtcgcaggtggcttcactgagattggcaagtttgccgttacgcagccacagttcgtccaacgccagtgctgccggcgcggcgccattgctgataatcatcagcttttcgccgcgcaatgggcgcatatggctcagggtttcaacggcggaaaagagttcgtgtgtgtcctgtacgcgcagcagccccgcccgctgaatagcggcatcccaggcgggatccatacctgagttgacatgcagtaatttctgcgccgccgggctgcggccgcttttaatgaccagaatgggtttattacgcgaggcgctacgggcggcggagacaaaacgccgggcatcgctgagatgctccagatagagcaaaatagcgctggtcttgctatcgcgggcgagaaaatcgagcaggtcatcgacgtcgatatcaaggctatcgcccaacgcaataaagtacgagaaacccatttcgcgctgctgtgcccagtccagaatggtgttagagacggcggcggattgtgagataaacgccagcttgccgcgctggatagggaccggagaaaagctggcgttcaggccctgccacggcgccagtagccccaggctgttggggccgagcagacgcatttgataacgggcggcgcattcgagcaacgccgggtactggtctggctgtgaagagaggataatgcaggttttacaccctttccgccctaaggcctcgagcaactcaagattgcgccgggcgttagtacagagcaccgccaaatccggggtaaacggcaggctgtcgatagttggccaggccaacacgccaagcaccgctttccaggcgggcgtcaccggcaggaccgggccattaaaaccaccggccaacaaattgcgcatcattaaatagccagcgcgctgcggtttcatcgatgcgccaatgacggcgatcgattttggccgcagcagtgcttccaggcctcgttggctcataccggtctcctttgatccccagtgaccgaatgattttaaacgctttcagcctgttgtgctgtgatactgcccttatgctgcgtttttcccgccagatagcggcttctgaacaggctaaagtgatcgccaagcgcggcagccgcctgcgcgtcgccggctaagtccagcagggcgatggcgacttcagccgtacagtactggccgtcggcatgggcctcgcgcaggtgataggcggagatgcgcgacaggtcgacagagattaccggcagcgcatcgagatacgggcttttgcgaaacattttccgcgcttccgtccaggtgccgtcgagcataataaacagcggcggcttaccctccggcggggcgctcagtacctgacgatccgctccggcataagaggccggaaagacgaccatgggctgataatctgggttggcgaccagatcgagcagcgcctgcggcggctcggtacgcgaccactgaaacgcttcggtattgggcagaatatcggcgataagacgcccggtattgctgggcttcattggctcggtgtcgaacatcaccaggcaaaaacggctgtcggcaggcgccggcgccagcgtggcgcacagacactgttttaggggaagcaggcagcgctgacagcggcggatgcggttgccgcgagcaagaaaaggccgggttgcgcgcgcgaggcgttcggcgcgtaggcgaaggacagcgttatctatcatgggagtcgttaatgaaaaacgctattgtcgcagaggagaaaacggggcacaagcggtgccccggtggctttactgctggttggcttcgttcagccagctatcgaacggcgctttggggacggcgccattcagcatgtcgaccatttcaccatttttgaacatcataatggttggaatgctgcggatgcggaagcgagcgctcagttcgcgttcggcttcggtgttcactttcacaaaacgcatttcgccgctgcgctcttcagccacatcttcaaagatcggcgcgaagctacggcatgggccgcaccacggggcccagaaatcaataacgactggcagatcgtcctttaatagtttatccagcgttgccccggtcgcgttgatgacatcgccgtcaaagagatcgtggccgcagcgtccgcacttggcgccatcggcgctacggtcttcggggatgcggttaagagcctgacaactggcacaaacggtattcataactaacctctggttatggggttgcagcgcggcacgtggccgatttgtttctgtaatgttacatattatcgatgaggcgcgaataaaggacaatgtcttttgttcgatggttacaatagaccaaggcttttaaatgaaataatggctaagtgaagatacatcgggtaatcttcgcgcttcgcgcagcgcaggtggagaaaatagatgagcgacgaactgaaaaataaaagcggcaaggtcaaagtgatgtatgtccgcagtgatgatgattctgacaaacgtacccataacccgcgtaccgggaaagggggagggcgtccaggaaagtcacgtgttgacggccgcagccgccctgcgcgcgatgaacgaaacagccgcggcgacgatcgcaaacgcgacgatcgcaagcgtaatgattttaaccgtgacgatgcatccccgtggcgcaccgtttcccgcgctccgggcgatgagacgccggtaaaagaagatcacggcggcatcagcggtaagagctttatcgatccggaagtgctgcgccgtcagcgcgcggaagagacgcgcgtctacggcgagaacgcctgtcaggcgctgttccagagccgtccggaagccatcgtacgcgcctggtttatccagagcgtcactccgcgctttaaagaggcgctgcgctggatggcggccaaccgtaaggcctaccacgtagtggacgaagccgaactggcgaaggcgtctggtaccgaacaccacggcggcgtctgcttcctgatcaaaaaacgtcatggtacttccgtggcccagtgggtggcgaaagcagaagccgaagattgcgtactggcgctggaagatgttggcaacccgcacaacctcggtgcgattatgcgtagctgcgcgcactttggcgtgaaaggcgtggtagtgcaggatgccggagtgctggagtctggcgcggcgatccgtactgcagagggcggcgcggaacatgttgagccgatcaccggcgacagctttatcgataccctgacgcagttccgtcaggctggctacgccatcgtctcgacctccagccataacggtacgccgctgtttaaggccgagctgccgaagaaaatggtgctggtattaggccaggagcgtgacggtctgtccgatgcggcgatctccagctctgacctcagcgtcgccatcgatggaaccggcaacgtcgaaagccttaacgtctccgtggcgaccggcgtgctgctggcggaatggtggcgtcagaataaggcctgatatcggtctctgaatgcaaaaagccagctgatgctggcttttttattatcgtcgctcactcgctttctgcgggcagcaccggcatccagtcaatgggcgcctcgccgcgttcggccaaccactggttggtttgcacaaaatggttgcagccgaagaaaccgcggtgcgccgacagcggcgacgggtgcggcgctttcagcacgcagtggcgctggcgatcgataatggcgccttttttctgtgcgtgcgcgccccacagcagaaataccactccttcacaatgctggttaatcagcgctatcactttatcggtaaaggtttcccagccgagactggcgtgtgaatgcgcctgaccggcgcgcaccgttaacacggtattaagcaggagcacgccctggcgcgcccagctttccagataaccatgcgccgggcgctgaaagccggggatggtgccttccagctctttatacatgttcagcagcgacggtggtatctgcactcccggtaaaacagaaaaggccaggccgtgcgcctgtcccgggccgtgatagggatcctgacctaagatgaccactttgacctcgcccagttcggtatagcgaaaggcgttaaagacatctttctgcggcggatagatagtcatgccggactggcgctcttcggcgacggtcttgagggtgttgagaaaatagggctgctgcttctcttccgccagcacgtcgtgccaggttaatggggtggtcatctcgctctcctgcaaagtgtcatgcccatagcttaactgcttctttctgcataacaaaatcgcgacgtcattcctgactggttgcgtataaaaaaaattgaaaatttacaaaattttttatggtacctactggcgtaacttgatgtaaaacaatactatcctcatatacccactttgagtgagtggtttttgttgatttaaatcaatgaatgccgggtgtgtggctgatatatatacactcatacaacaatggttttaccaattggccgcaaagaggccaaaatcgaataaacactgcctgggaggcatcaaatgattactggtatccaaattactaaagcggcaaacgacgacctgctgaactctttctggctgctggatagcgaaaaaggcgaagcgcgctgcctgtgtgccaaaggtggttttgcggaagatgacgtggttgcggtgagcaaactgggtgaaatcgaataccgtgaaatcccggtagacgtgaaaccggaagtccgcgtggaaggcggtcagcacctgaacgtgaacgtgctgcgtcgcgaaaccctgctggatgccgttgagcacccggaaaaatacccacagctgaccattcgtgtttccggctacgcggtacgttttaactctctgactccggaacagcagcgcgacgttatcgctcgtacctttaccgaaagcctgtaaggctgaagccagatgtgaaaacgccgggatatcccggcgttttttttactcttcgttggacgttgacggcgtcacggcagagcttggcttacggcgcttaccgatgtttttggtatcgcggtgacgtttcttcacccgcggcttctctttttctttctcttttttctcggcgcgtttcgccagcactttcttcgatggtttaccggttaacttctcgctcggcgcgcgggttttcggtcgcaattcatcaatcacacgagctttcagcggttcttcaacgtagcggccgattttgcccagcagcaggtgatcgtgcgcttcaaccagcgaaatagcggtgcctttcttacctgcacggccggtacggccaatacggtgcagatagatatcggctgtgcgcggcatatcgaagttaaacacgtggctgacatccggaatatcaataccgcgcgcggcgacgtcggtggcaatcagcacgttcacgcgaccatcggtcaggcgtttaatcgcttcgttacgtttgatttgcaccatttcgccttccagccagcaggtggtaatgcctgcttcgtgcagcttagcggccagttcgtgaacgcgctcgcgtttacgcacgaagacgatagagcgggttgcttccggttgtttcagcagattaaccagcagcgcggttttatgatcgatatcatcggcgcgatagtaccactggtgaatttttttacgttcgcgggtcgacggatttgcagaaacttcaaccggctcttccagcaggcgttcggcaaagtctttaatcgcatcgccttccagcgtggcggaaaacagcatggtctgcttgcgccaacgggtttcaccggcgatggtttcgatatcctgggcaaagcccatgtccagcatgcggtccgcttcatcaaggatcagcgtttctaccgcgcggcagtcgaagttctcttctttaatatactgcagcaggcgaccggtggtggcgaccacgatatcctggttttcgctgaacacttccgcgtggttcatgtacgcaacgccgccggtaatggtggcaatatccagatgggtatgcttcgccagttcgcgggcgtgatcggcaacctgcatcgccagctcgcgtgtcggcgtcaggataaggatccgcggcggccccgatttcttacgcgggaaatcaagcagatgctgcaacgctggcagcaaatatgccgcagttttaccggtgcctgtcggcgcagaaccgagaatatcacggccatcaagcgcaggcggaatagcggcggcctgaatggctgtcgggcgtgtgaaacctttatcctggagcgcttccagcaggttttcgtcgagttcaagttcggaaaaagtcgttacagtcatgttctacctctgagtgggccgccgattatagacgttactgacgtaatgttcatctgtttgtaaggctatctgttctccggtattgtgcatagccttaagcacaggagttttcgtcagcaaggttttgaggatgtctcagtcgaagtttgcgctgccgcgcaatggttttacctttaaacaattttttgtcgcccacgatcgctgcgcaatgaaagtcggtaccgacggtattctgctgggcgcctgggcgccgattgctcaggtgaagcacgtgctggatatcggaaccggtagcggtttgttggcattaatgttagcccagcgtaccgcggattcggtccaactggatgcggtggagttggatgaagaggcggcgacgcaggcgcgggataacgtggcggccagcaactggtccggacgcatcgccgtataccaggcgccgattcagcagtggcagccgcagccgccgcggcgctatgagctcatcgtcagcaatccgccgttttttgccgaaggcgtaccttgtgcgacgtcgcagcgcgaacaagcgcgttataccacctcgctcgatcatacgacgctgctcacctgcgccgcggatctgattaccgaggagggctttttctgcgtggtactgccggtggatattggtaatgcgtttgtcgaacgggcgaaagcgatggggtggcatttgcgcttacgcaccgacgtggcggaaacagaaatgcgtccgccgcatcgcgtcctgctggcattctctcccaccgccggcgagtgttttagcgatcggctggtggttcgtgggccagagcagcagtactctgaaggctttaccgcgctgacccgcgacttctatctctttatgtgagcaagcggcgagagcaccgacgggccgctgttttccagcgtgtccgggtagtcgagcgtgtagtgcaggccgcggctctccttacgctgcatggcgcaacgcacgataagctcggccacctgcaccagattgcgcagctccagtaagttattggagacgcgaaaacgcgcgtaatactcatccagctcctgctgcagcatagtaatgcgccgcagggcccgttccagccggcgggtggtacgcacaattccgacatagtcccacattagcaggcgcagttcgtgccagttatgttgaatcaccaccagttcatccgggatctcaacctggctttcatcccatggcggcagctgctccgccgcttgcgccagcggcaggcgtttcgctatgtcctcggctgccgaccagccgtacaccagacactccaacaatgagttcgaggccatgcggttggcgccgtgcagcccggtgtagcttacctcgccgatggcgtacagaccgtcgacgtcggtacgtccgttatcatccaccatcacgccgccgcaggtgtagtgggcggcgggtacgataggcaccggctctttggttaaatcaatgccaaggccgagtagcttttcataaatcatcgggaaatgctggcgaataaacgcttcgggcttatggctaatatccagatacatgcagtcgacgccgaggcgcttcatctcatggtcgatggcgcgggcgacgatatcgcgcggggccagttcgccgcgttcgtcgaagtccggcataaagcggctaccgtcaggccgtttcaacagcgcgccttcgccgcgcagggcttctgttaagaggaagtttctcgcctgtggatgaaacagcgcggtagggtggaactggttaaattcgagattggccacacggcatcccgcgcgccaggccatggcgatgccgtcgccggaggagacatcaggattggtggtgtattgataaactttagctgcgccgccggtcgcgagcaccacggctcttgcgctgcaggtttctaccttttccttattacggttccagatccacgcgcccaccacccgccgcgtgcccggcaggccaatcttatcggagataatcaggtcaaccgcgttgctacgttccagaatggtgatattcggatgcgccagcgctttgccaaccagcgtcgtctcaacctctttgccggtggcatcggcggcatgcaggatccgccgatggctatgtccaccttcgcgggtcaggtggtagctctcttcaccgttggcctggacctgggtatcaaacagtaccccctgatcgataagccactgcacgcagggtttggcgttgctggcgacgaaggagacggcatgacggtcacaaagtccggccccggcgatgagcgtatcttcgacgtgggattcgatgctgtcggtttcatcgaaaacggcggcaatccctccctgggcgtagaaagttgaaccttcgctaaccgggcctttgctcaggacggtaaccgagtggcgttccgccaggcgcagcgccagagacaatccggcagcgccgctgccgataatcaacacatcacaggaaaagtcaggagtcgtcttcatagcttttgtttaatttactaaacacaataacctcaccatagcacctgatggggctaaatcgtacaattattttcgtgaatggttgtgcgggctaaacagagctggtggaaaagtaaataggtaaacgaaagaaaatatttgcgaagcaggccgttaccttcagattttatagtgaaaaataagttgggttacgttacccttcaggcgggccttgcgctttttcttcattagcttacctggcgttgaacaacgggacttataatgagagataacaatcagtccaccgttgtcagacaaaaatcaaaagcgtaacggaactttattgtgttcagacactccaaacgtctgcttgctcatattgcagtgcttgggtggtgttctgaatacgcatgggaattgggtttggggagacattacctcggatgagcgagcagttaacggatcaggtcctcgttgaacgggtccagaaaggagatcagaaagcctttaacctactggtagtgcgctatcagcacaaggttgcaagcctggtctcccgctatgtaccgccgggcgatattgctgacgttgttcaggagtcgttcgtgaaggcgtggcgtgcgctggattctttccggggggatagcgctttttatacctggttgtatcgtatcgccgtaaacacggcaaagaattatctggttgctcagggacgccgtccgccatcaagcgatgttgacgccaacgaggcggaaaacttcgaaagcggcggtgcattgaaagaaatttcgaaccctgagaacttaatgttgtcagaagagctgagacaaatagtttttcgtaccattgaatcgcttcccgaagatttacgcatggcaattacgttgcgggagctggatggcctgagctatgaagaaatagccgccatcatggattgtccggttggcacggtacgttcgcgtatcttccgggcacgtgaagctattgataataaagttcaaccgctaatcaggcgttgacgatagcggaatactggaaaagggtatcaggcatgcagaaagaaaaactttcggccttaatggatggtgaaacgctggataacgagctgctcaatgagctgagtcgttcttctgaaatgcaaaaaacctgggagagctaccatctcatccgcgatacgctgcgaggtgataccgccgagatgctccaattcgatatctcagctcgcgtgatggccgccatcgagaacgaacctgctcgtcaggttgcgccgcttattcctgagtctcaacctgctccacaccagtggcgtcagatgcctttctggcagaaagtgcgcccgtgggccagctcgcttacccaaatgggcgtggctgcgtgcgtgtctctggctgtgatcgtcggtgttcaacaatacaatggacactccgatgcctcccagcagccggaagcgccagtcttcaataccatgccgatgatgggcaaagccagcccggtgagcctgggcgttccggctgatgcctccgccggcagcggtcagcaagcgcaggttcaggagcaacgtcgtcgtattaatgctatgctgcaggactatgaattgcagcgtcgcctgcacgctgagcagcttcagtttggccaggcccagactcagcaagccgctgttcaggtgccgggttatcaaactttaggaacgcaatcgcagtaatgaagcaactttggtgtgccatgtcactcatggcaggcagcctgttcttctccaccaacgcctcggctgatacatcgtccggggcgttgttgcagcagatgaacctggccagccagtccctcaactacgagctgtcttttgtcagtatcaacaaacagggcgttgagtcgctgcgctatcgtcatgtgcgattgaacaaccagccccttgctcagttgctgcagctcgacggtccgcgtcgggaagtggtgctgcgcggtactgaaatcagctactttgaacccggtctcgatcccttcaccctgaacggcgattatatcgtcgattccttgccgtccctggtgtataccgatttcaaaaagctggcctcgtattatgatttcatctccgttggccgtacgcgtatcgccgatcgcctgtgcgatgtggtgcgtgtggtggcccgcgacggtacgcgctatagctacattgcgtggctggatgccgagaccaagctgccgctgcgcgtcgacttgctcgaccgcgacggtgaaactctggagcagttccgggtggtctcattcaatatcggtgataacgtaagctcgagtatggaagcgctgtcgaaagccagcctgccgccgcagctgtcggtcccggaaagcggcaataaagccaactttaactgggcgccgacctggctgccgcagggcgtcacggaagtttccagcagtcagcgtcgtttaccaaccttcgacggtcctgtcgagtcgcgtctctattccgatggtctgttcagcttctccgtcaacgttaaccgcgcgacggtaaacagtagcgatcagctgctgcgtactggccgtcgtaccgtcagtacctcggtgcgcgataacgccgaaatctcggtggtgggcgaattaccgccgcagacggcaaaacgtatctccgacagtattaagttcagggccgcgcaatgatcaaagagtgggcgacagttgtctcctggcacaacggcgtggcgcaggttcactgcgatgttaaagcctcttgcagcagttgcgcctcgcgcgccggctgcggtagccgggtgctcaataaactggggccgcaaaccagccataccattagcgttccctgtgaccagccgctaacggccgggcaaaaagtggaactgggcattgctgaaagcagcctgctgggttcggcaatgctggtctacatggcgccgctgttcgggctgtttgtgatggcatcgattttccaggtattgtttgccagcgatatcgcttcgttgtgcggcgcgctgttgggcggcgtcggcgggttcctggtggcgcgcgggctgtcgccgaagctggctgctcgccagtcgtggcagccggtgattttaagcgtcggtttaccgccggatttgcttcgcgtcgatacgccttcctctgaaatggggcagtgatttcactgtccctcatctttatttacgcttcctgttacaacgccacaattctgccgttatgctggatctaacagcatttcctggtttcgcggatgtagtgtagaatgcggcgttttcggattaaaaaacgtcaggcacagaacagcggcctcatgagactcgtaaggcataattaactctaaatatgaagaatatacgtaacttttcgatcatcgctcacatcgaccacggtaagtcgacgctgtctgaccgtatcatccagatttgcggtggcctttctgatcgcgaaatggcggcccaggttctggactccatggaccttgaacgtgagcgcggcattaccatcaaggcgcagagcgtcaccctggactataaagccagcgatggtgaaacttatcagctcaactttatcgacaccccgggccacgttgacttctcctatgaagtatcgcgctccctggcggcgtgcgaaggcgcgctgctggtggttgacgccgggcagggcgtagaggcccagaccctggcgaactgctataccgcgatggaaatggacctcgaagtcgttccggttctcaacaagatcgacctgcctgcggccgaccctgagcgcgtagcggacgagattgaagatatcgtcggtatcgacgctcacgacgcggttcgctgctcggcgaaaaccggtgttggcgtgccggatgtgctggaacgtctggtacgcgacattccgccgccggaaggcgatccggacgcgccgctgcaggcgctgattatcgactcctggttcgataactatttaggtgtcgtgtcgctggtgcgtattaaaaacggcaccatgcgcaaaggcgacaaaattaaagtgatgagcaccggtcaggtctataacgctgaccgtctgggcatcttcaccccgaaacaggttgaccgtaccgaactgaaatgcggcgaggtgggttggctggtgtgcgctattaaagacatcctcggcgcgccggtgggcgataccctgaccgcggcgcgtaatccagcggataaagcgctgccgggcttcaaaaaagtgaagccgcaggtctacgccggtctgttcccggtcagctctgatgactatgagaatttccgcgatgcgctgggtaaactgagtctgaacgatgcatccttgttctatgagccggaaagttcgacggcgctgggcttcggcttccgctgcggcttcctcggcctgctgcacatggaaatcattcaggagcgtctggagcgtgaatacgatcttgacctgattaccaccgcgccgacggtagtctatgaagtagaaaccacctctaaagaggttatctacgtcgatagtccatcgaagctgccgccgctgaataatattcaggaactgcgtgagccgatcgccgaatgtcacatgctgctgccgcaggaattcctcggtaacgtgattaccttgtgtatcgagaaacgcggtgtgcaaaccaacatggtttaccatggaaaacaggttgcgctgacctatgaaatcccgatggcggaagtggtcctcgacttctttgaccgtctgaagtccacctcccgtggctatgcgtcgctggattacaacttcaagcgtttccaggcctctaacatggtgcgcgttgacgtgctgatcaatggcgagcgcgtcgatgcgctggcgctcatcacgcacaacgacaacgcgccgtatcgtggccgcgagctggtcgagaagatgaaagatctgatcccgcgtcagcagttcgatatcgcgattcaggcggctattggtaaccacattatcgcgcgctctaccgtgaaacagctgcgtaaaaacgtcctggcgaaatgctacggcggtgacgtcagccgtaagaaaaagctgctgcagaagcagaaagaaggtaagaagcgtatgaaacaggttggtaacgttgaactgccgcaggaagcgttcctcgccattctgcacgttggtaaagacggcaaataatctaaggagttggcatggcgaacatgtttgccctgattctggtcattgcgacccttgtgacagggctgttgtggtgtctggataagttcatattcgcaccaaaacgtcgtgaacgtcaggccgctgctcaggcagcgaccggcgagcaactggacaagaaaacgctgaagaaagtcggcccgaaaccgggctggctggaaaccggcgcctcggtcttcccggtactggcgattgtgctgattgtgcgttcgtttatctatgaacctttccagatcccgtcaggttcgatgatgccgactctgctgattggcgattttatcctggtggagaaattcgcctacggcattaaagatccgatctaccagaaaacgctgatcgaaaccggtcatccgaagcgtggcgatatcgtggtgtttaaatatccggaagatccgcgtctggactacattaaacgcgcggtcggtttgccgggcgataaagtcacttacgatccggtggctaaacaggtgacgattgagcctggctgcgcgtcgggtcaggcatgcggtagcgccttgccgatcacctactccaacgtcgaaccaagcgatttcgttcagaccttctcccgccgcaacggcggcgaagccaccagcggtttctggcaactgccgaaaggtgaaaccaaagccgatggtattcgtctgaccgagcgtaaagagacactgggcgaagtgacgcaccgtattctgacggtgcccatcgctcaggatcaggtggggatgtactatcgtcagtccggccagccgctggcaacgtgggtagttccgccgggtgaatacttcatgatgggcgacaaccgcgacaatagcgccgacagccgttactggggctttgttccggaagcgaacctggtgggtaaagctaccgccatctggatgagcttcgagaaacaggaaggcgagtggccaaccggcgtgcgtttatcgcgcatcggcggcattcactaattccctgtcttaattcacgctgccggggaaataacggcagcgtgaattatttagtatttaaatccatccaaactaacgacatcccttgtcgttgcgtatagaatatcccccgaagtttttggttgtctctcgaaagagtgacactgcacacgaaaccgcgttggttagtttctgcccttatatatcaagggtatgtatgctcaggtcggtttcgtgtgctgcatctttgacgcattcatttattggtaacgcatgaaccccatcgtaattaatcggcttcaacgaaagctgggctacacttttgttcatcaggagctgttgcaacaggcattaactcaccgcagtgccagcagcaaacacaacgagcgtcttgagtttttaggcgactctattttgagtttcgtgatcgccaatgcgctctatcatcgtttccctcgggtagacgaaggggatatgagccgtatgcgcgcgacgctggtgcgaggcaatacgctggcggaaatcgcccgcgaatttgaactgggcgagtgcctgcgccttggtccaggcgagctgaagagcggcggtttccgtcgcgaatcgattctggctgacaccgtagaagccttaatcggcggggttttcctcgacagcgatattcagaatgttgaacgcttaatcctctcctggtaccagactcgtctggacgaaatcagcccgggcgataagcaaaaggatccgaagactcgtctgcaggagtatctgcaggggcgtcatctgccgctaccgtcctacctggtcgtccaggtgcgtggcgaagcgcacgatcaggaatttactatccactgccaggtcagtggcctgagtgaaccggtggttggcacaggttccagccgtcgcaaggcggagcaggctgccgccgaacaggcgctgaaaaaactggagctggaatgagcgaagaaaaaagttattgcgggtttgtcgccatcgttggtcgtccaaacgttggcaaatccacgttgttgaacaagctgcttgggcagaagatttcgatcacttcccgtaaagcgcagactacccgtcaccgcatcgtcggtatccataccgaagggccgtatcaggcgatttatgttgataccccgggcctgcatatggaagagaagcgcgcgattaaccgcttaatgaacaaagcggccagcagctcgattggcgatgtggaactggttatcttcgttgttgaaggcactcgctggacgcaagatgacgagatggtgctaaacaagctgcgtgatgcgcgcgcgccggtgattctggccgtcaacaaagttgataacgtgcaggagaaagcggatctgctaccgcacctgcagttccttgccagccagatgaacttcctcgacattgtgccgatctctgcggaaaccggtaccaacgttgataccatcgcgtcgatcgtacgtaaacatctgccggaagcgattcatcacttcccggaagattatattaccgaccgttcccagcgctttatggcctccgagatcatccgcgaaaagctgatgcgtttcctgggcgctgaactgccgtactccgtgaccgtcgaaattgaacgtttcgtgagtaacgaacgcggcggttacgacatcaacggcctgatcctcgtcgagcgtgaagggcagaagaagatggtaattggcaacaaaggcgccaaaatcaaaaccatcggcatcgaagcgcgcaaagacatgcaagagatgtttgaagcgccggtgcacctcgaactgtgggtcaaagtgaaatccggctgggccgatgacgagcgcgctctgcgcagtctcggttacgttgacgacctctgagttaacgcaacgtggatggatggcagcgcgcctttgtcctgcatagccgaccgtggagcgaaaccagtctgatgctggacgtcttcacggaagagtccggtcgcgtgcgcctggttgccaagggtgcacgctccaaacgctctaatctcaagggcgccttacagccctttacccctttactggttcgcttcggcggccgcggcgaagtcaaaactcttcgcagcgcggaagccgtctcgctggcgctgccgctcagcggtatcacgctctacagcggtctttacgttaacgaactcatctcccgcgtgctcgagcacgaaacgcgcttctctgaactctttttcgactacctgcactgcattcaggcgcttgccgggaccagcggttcgccggagcccgcgctgcggcgctttgagctggcgctactcgggcacctgggctatggcgttgatttcctccactgcgccggcagcggcgacccggtggatgacaccatgacctaccgctatcgcgaagaaaaaggctttatcgccagcctggtgattgataacagcacgtttaccgggcaccatttgaaagcgttggctagccgagagtttccggatgtagatacgctgcgcgccgcgaagcgctttacccgtatcgccctgaagccgtatcttggagggaaaccgctcaagagtcgggaattgtttcgccagtttatgcccgcgcgaaaggcgcgagccgataatacgaataatgattaacgaggattgtcatggctgaattactgttaggggtcaatattgaccatattgcgacattgcgtaacgcgcgcggtacggcttatccggatccagtgcaggcggcttttattgctgaacaggccggcgccgatggtatcaccgtgcacctgcgcgaagaccgccgccatatcaccgatcgtgacgtgcgcatcctgcgccagactctgcatacccgaatgaatctcgaaatggcggtcactgaagagatgctggcgatcgcctgcgaaactaaaccgcacttttgctgcctggtgccggagaagcgtcaggaggtgaccaccgagggtgggctggacgtggccgggcagcgcgataagatgcgcgatgcctgtaagcgcctggcggatgccggtattctggtctccctgtttatcgacgcggatgatgagcagatcaaagcggctgccgacgtgggcgcgccatatattgaaatccacaccggctgctatgccgatgccaaaaccgatgccgaacaggcaaaagagcttgagcgtatcgccaaagcggccacttatgccgccagccttggtctgaaggtgaatgccggtcacggtctgacctatcacaacgtgaaagccattgccgccttgccggaaatgcacgaactgaatatcggtcatgccattattggtcgcgcggtgatgagcggcctgaaagaagctgtcgcggaaatgaaacgcctgatgctggaagcgcgcggctaatggcgattctcgggctgggtaccgacattgtcgaaatcgcccgcatcgaagcggtgatcgcccgtagcggcgatcgcctggcgcgccgggtgctgagcgatcacgaatggcgtatctgggagcagcaccagcagccggtgcgtttcctggcaaaacgttttgcggtcaaagaggcggcggcgaaagcgttcggaaccggtattcgcaacggtctggcgtttaaccagttcgaagtttacaacgatgaattgggcaagccgaaactgcggctatggggtgaagcaaagctattggcggaacgaatgggggtaagcgctattcacgtcactctcgccgatgaacgccactatgcctgtgccacggtgatcgtcgaaagctaaacccgcggttaaagcttgtccgcgtggtgcatgagcacgaatttatcccacaactgttcttcgttctcgacgtgcgccggatctttcagaattgtattcgggatcgggcacactttctggcaggttggcgtgtcgtagtggcccacgcactcggtgcagcggtcgctgttaatctcataaatgctctcgcccatcgaaatagcctcgttcgggcactccggttcgcacatatcgcaattgatgcattttttggtgattaacagcgccatcaggaaaatctcagaaacaacacaaacagggcgggcattatacgcccattttctactcagaccagctttttcaccggcgcttcgctagcgtgtttatttataatcccgttgagcccgaatatgtacccggtacatttattaacttgcttgttgtaccccgtacacttatgatgattttataatcattatacgcaggatgcggtatgtacacttttattgagctgcagggtttcagtaaacggcgtcaggcgcttctaccggatgacgagtttcgcttttttcaggagatgttgattgaggatcctgaggctggcgataccatcgcagggacagggggatttcgaaaaattcgctggagccgaccgggatgggcaagcgtggtggggtgagaattatttattacaatgtgacgcgtaaagggcgaatttatctggcattggtctatcccaaaaatgagctggatgatttaacggaagaacaaaagaagatgctgaaacagttatccgctatgctggaataacgctgagtttctatcactccacgggaccacggtgtcagtggtgcccacgagggcgatgaggtacagatgaaagacgaattatttgccgatctgctggccagtgcagaagaaatggtgagaattgaaaaaggtgagcaaacccctgagccacagcatgttcacacttttagcccgattgatgtgaaagcgattcgcgaagcgactggcttaaaacagcaggattttgctctcgccgtaggcgttagctatgacttagttaaaagctgggaaactaaacggcgtcagccaaccggggcgccgcgaaaattgctgcttttattacagataaatccttttattatcaatcagctaaaaacaatttgatgtttatgggcattgcctgatgcccattttctactcagaccagctttttcaccagcgcttcgctatgccgtatgcgttccggcgcgtgttcaagatcttgctgtaccagcgccataaacaggagatcggtgagcatcatttgcgcgctggtggaggagatcgccgcgctgcgtgtcgcctgctcttcagcaatggtgtaaagacactgcgaagcctgttgctgcaacgcgttgggagtgaaaccggtgatcgcgaggatcttgctgccgacgcggagcgcttcagcggcagccatattgatctcgcggcgttcgccggagtaggagatagccagcagcagatcgtccgccgacatcgcctgcaccgttgccagcagcgcatgcatatcctgctcggcgacggcgttgatgccaattttcattaacttccagctaaaattgcgcgccaccagcccggaggcgccgataccggtaatgatcacccgacgagcatcgcgcagcagggccactgcctccagaagcttctcttcgctgttgacgtccagcgaagcgtgcatcgccgcgatgttatctttgatcagcttttcgcccaccagacgcagcggatcgtcgccgcgaatttggttatgtaccggcaccgagtgcggatccgggctgctggccagcgcttcgctgagcgccagttttaatgccggaaagcctttgaaccccattttttgcgcgaacttcaccacgctggactggctgacgcccgcttcgcccgccagctgctgtgagctgagatggcgggtttggtccggctgagccagaataaagtcggcgagttttttgtcgctcgccgccagcgacgggtaacgttggcggatgcggattaaacagttcatggcttctccgaagggggcgttagcggctgaaagaattttgtattcgattataagtggaataatacgaattaaaaattctgctgtgaagaattatgcgaatgggtcagattatgaatcttacctcaaccgtggcagacaatttcgcgttcgttgcggcaagcctgttaagctatcggcatcgccaggaaaatccgtaccagaaaggagttcggtttgaacagtaacgcgcgacgagtcgtgtttttcgatcttgatggcacattgcaccagcaggatatgttcggcagctttattcgttacctcttacgtcgtcaaccgctcaacgtactggcagtggcggccttgtcgccaatagtactgctggggctgttggttaacggacgcgcggcgcgctggccgatgagcctgctgctgtgggccgccacctgcggtcggcgtgaaagccatcttaagcgtctggaggcggagttcgttagctggtttcgccagcacgtgaccgcctttccggtggtacagggccggctaaacgactatttaaccagtaccgatgccgatgtctggctgattaccggctcaccgcagtcgctggtggaacaggtctatgccgatacgctttggctgccgcgcgtaaagcttatcgccagccgcatgagccgccgtcgcggcggctgggtgctgacgctgcgttgcctgggccatgagaaagtagcgcagctggaacagcggatcggcgcgcctctacgcttatatagcggctatagcgatagcgagcaggataacccgctactctgtttttgccagcatcgctggcgggtgacgccgcagggcgatctccagcagctcgaataattccgctgcaggcgaattatttgggcgatatatagcgcccatgtataatgcgccccgctttttctgcaggagtgccgctgtgtctgatcacgaatttaacgatgaatactggatgcgccatgcgctgacgctggcgaaacgcgccagggaagagggcgaagtgccggtgggcgccgtgctggtgcataacaatcaggtcatcggcgagggctggaaccggccaattggtcgtcacgatcccaccgcccatgccgaaattatggcgctgcgtcagggagggctggtcctgcagaactatcgtttaattgatgctacgctgtacgtcacgctggagccttgtgtgatgtgcgccggggcgatggtgcatagccgcatctcgcggctggtgttcggcgcccgcgatgctaaaaccggcgcggccgggtcgttaatcgatgtgctgcatcatccggggatgaaccaccgcgttgaaattaccgagggaattctggctgaatcttgctccgcgatgctgagcgacttcttccgctggaggcgggaagagaaaaaggcattgaagaaagcgcgtcaggaagagggttaacgtcccaatgtcggcaacttcagcttaacgttgtcgacaagcttttcgccgcgaaacttaaagaagggcatcgcatactctttatgctcgctatcgagttcttccggcgcgacggctggataatcttcggcaatcgccatttcctgcgccgctttcctttcctgttcagacaaatatccaaccaggctgatatggtacttacgaatattttccacgtaggcgtaagcctcatggcctcgggcgtagccatattttaagcggctgtagtagggcttctggctcagcaatggcagacgctgcttaacgtcggaccagctgttcgggttgcctttttgttttttagtcagcgccatcgcgtcaagcatatgcgcgtagcccatgttataggccgccagcgcaaaccagatccgctcctctttcgggatcgcatcaggcactttggccatcatatcctgcagatagcgcatgccgccgtcgaggctctgttcggcatcggtacgatcggtcagacctaaactctgggcggtgttacgggttagcatcatcataccgcgcacgccggtcggcgaggtggcctgcggatcccagtgcgactcctgccaggcaatcgccgccagcaatcgccagtcgatctgtcgggcgtatttctcaaacagcggcttcagatccggcagcgtattctgcactgcgcgcaggaaggtgcgggtatcaacatagtcgaagtcgttgccgtggccgagatacttctcttccaggcgggcgagagtgccgtcttcattcatactattaaagaaatcgagcatggctgccgatagtgaattgtcttcgcttttttcgctaaaccaggtgaccggctgttcatcgctgatatcgagcgccaccgccagctccggatgtacgcgctggaacaggctgacggcgacggaatcggcgacggtatattccagcgtgccgtcgatgactgcctgcattagggcggtggtgccgcgtttttcatcgacgcgccagttgaggttcggatatttgctctccttcaacgcctgcaggtcgttaagggcgacatggcctggggcgatggcgagctgttcggcgttgatcccggccagcgtacgcggacgattaccgccaacgcgatagaccagctgctgcgaaacggaataataggtggggcccgcctgatagttcttcacccgctcggtgttatagaccagaccggcggccagcatatcggttttaccagcatcgagatcgtcaaacaattggctgatattctgccgcacggtgactttcagcttcaccccaaggtaatcggcgaagcgtttcgccagttcgtaatcgaggccgtagtctttgttgttgattgcggcgtaggtcagcggcgagttaatcgtactcacgcgcagctcgccgcgtgcgatgatcccggcaacgcggttctccggttttcccatccacggcaaagacggccacagcgcagccgccaacaaaagggtgacgacgccgatcagcagataattaatctttaattttttcaaatagttaattttctgcagcgtggagttcctcagctgggtatatccgggaaaagtaaaaggttgccgtaagttgagcggcattttgcttaagaatgcgccagttggcaacttattcgcgattcatgtcacatttattgataaaactgatgaatcattttatttctacgcaaacggtttcgtcggggctcaggattctctataatggcgcccgtttccccttggctcaccttgaaagcttcgaagacgagagacttatgatggatattttgcgtggttcacctgcactgtcggcattccgtatcaacaaactgctggcacgttttcaggcggccaacctgccggttagcaccttatacgcggagtatgttcactttgccgacctgagcgccccgctaagcgatgaggagcgcgaaagactggtcagactgcttaaatatggcccaagcctcagcagccatacgccaaccggtaaattactgctcgtcacccctcgccccggcactatctccccctggtcctctaaagctaccgacatcgcccataactgcggtttatcgcaggtcgtgcgactggaacgcggcgtggcgtactacgttgaagcacaggggctgagcgacgcgcagtgggacgccgttgccgcagaactgcacgatcgcatgatggagagcgttttcactgagctggaagagggagagaagctgtttgctcaccatcagccgacaccggtgaccagcgtagacctgctgggccagggacgtcaggcgctgattgacgccaacctccgtctggggctggcgctggcggatgacgaaatcgactacctgcaggacgcattcgttaagcttggccgcaatccgaacgacatcgaactgtatatgttcgcgcaggccaactcggaacattgccgccacaagatttttaacgccgactgggtcatcgacggccaacaacagccaaaatcgctgtttaaaatgattaaaaataccttcgagaaaaacccggaatatgtgctgtctgcctataaagacaacgccgcggtaatggaaggttccgaagtcggacgctatttcgccgactaccagaccgggcgctatgacttccatcaggagccggcgcacattctgatgaaagttgaaactcacaaccacccgacggcgatttcgccgtggccgggcgccgcaaccggctccggcggcgagatccgcgatgaaggcgccacggggcgcggcgcgaagccgaaagcaggtctggtcggcttctcggtttctaacctacgtatcccgggttttgaacagccgtgggaagaggatttcggtaaaccagagcgtatcgtgaccgcgctggatatcatgaccgaaggcccgctgggcggcgcggcgtttaacaacgaatttggtcgtccggcgctgaatggctacttccgtacctatgaagagaaagtgaccagccacaatggcgaagagctgcgcggctatcacaaaccgatcatgctggcgggcggtattggcaacatccgcggcgagcatgtccagaagggcgaaatcaccgttggcgccaagcttatcgtgctgggcggcccggcgatgaacattggtctcggcggcggcgcggcgtcatccatggcttccggccagtctgatgccgatctggatttcgcctctgtacagcgcgacaacccggaaatggagcgccgctgtcaggaagtgatcgaccgctgctggcaactgggcgatgcgaacccgattctgtttatccacgacgttggcgcgggcggtctctctaacgccatgccggagctggtgagcgatggcggccgcggcggaaaattccagctgcgcgatatcctcagcgatgagccgggcatgagcccgctggagatttggtgtaacgaatcccaggagcgttacgttctggcggtcgcgccggaacagctgccgctgtttgaagagctgtgccgccgcgagcgcgcgccttatgcggtgatcggcgaagccacggcggagcaacaccttagcctgagcgacagccactttaacgatcggccgatcgacctgccgctggacgtcctgctcggcaaaacgccgaaaatgactcgtgacgtgcaaacgctgaaagcgcagggcagtgagctggatcgtcaaccaatgacgattgccgatgcggttaaccgcgtgctgcatctgccgacggtggccgagaaaaccttcctcgtgaccatcggcgaccgcactgtgaccggtatggtagcgcgtgaccagatggtgggaccgtggcagatcccggtagccaactgcgcggtaaccaccgccagcctcgatagctactacggcgaagcgatggcgatgggcgaacgcgcgccggttgcgctgctcgactttgccgcctccgcccgcctggcggtcggcgaagcgttgacaaacatcgccgctacgcagattggcgaacttaaccgcgtcaaactgtcggcaaactggatggcggcggccggtcacccgggtgaagacgccggtctgtatgaggcggtaaaagcggtcggtgaagaactgtgcccggcgctgggcctgactatcccggtgggtaaagactcaatgtcgatgaaaacccgctggcaggaaggtagcgagcagcgcgaaatgacctcgccgctgtcgttggttatctccgcgtttgcccgcgttgaagacgtgcgcggcaccgtgaccccgcagctctctacggaagataacgccctgctgctgatcgatctcggcaaagggcgtaacgcgttgggcgctaccgcgctggcgcaggtttatcgtcagctaggcgaccagccggccgacgtgcgtgatgtcgcgcagcttaaaggcttctgggacgcgatgcaggcattggtagcgcagcgtaaactactggcctaccacgaccgctccgatggcggattgttagtgacgctggcggaaatggcgttcgccggtcactgcggcgtaactgccgatattgccgcgctgggcgacgatcgtctggcggcgctgttcaacgaagaattgggcgcggtgatccaggttcgcgccgccgaccgcgaagccgtggaagcgctgctggcgatgaatggtctggcagattgcgtacactatttaggtcaggcgacggcaggcgatcgttttgttattaccgccgacggtcaaccgctgttcagtgaaagccgcaccacgctgcgtatgtggtgggcggagaccacctggcagatgcagcgcctgcgcgataatccggagtgcgccgatcaggagcaccaggcgaagtctaacgatagcgacccgggccttaacgttaagctgtcgtttgatatcaatgaagatgttgccgcgccgtatattgcgaccggcgcgcgcccgaaagtggccgtgctgcgcgagcagggggttaactctcacgttgaaatggcggccgctttccatcgcgccggctttgacgccatcgacgtgcatatgagcgatctgctggcgggtcgtactggtcttggcgacttccatgcgctggtggcctgcggcggtttctcctacggtgacgtactgggggcaggcgaaggttgggcgaaatcgattctgttcaacgaacgcgtacgcgatgagttcgccactttcttccatcgcccgcagacgctggcgctgggcgtgtgtaacggttgtcagatgatgtccaacctgcgtgagctgatccctggaagcgacttgtggccgcgcttcgtacgcaaccactctgaccgctttgaagcacgtttcagtttggttgaagtcacccagagcccatcgctgctgctgcagggcatggccggttcgatgatgccgattgccgtttctcacggcgaagggcaggtggaggtgcgggatagcgcgcacctggccgcgcttgaaagcaaaggcctggtggcgctgcgcttcgtcgataacttcggcaaagtgacgcaaacctatccggcgaacccgaacggctcggtgaacggcattaccgcggtgaccagcgaaagcggtcgcgcgacgattatgatgccgcacccggaacgcgtcttccgtaccgtcagcaactcctggcacccggaaaactggggtgaagacagcccatggatgcgtatcttccgcaacgcgcgtaagcaactgggttaataccgcgaacgtattgtgttgataaaaacgagccccctgttaatcagggggcttttttatttgtgatcgaggccatatcagagtgtcgggaattaccgacagacgcggttttatagtgtctctgaatggcgacacataacttattgatttttaatatatgtaattgaaggttcatttgttgttgccaattggcgacactatggttaaaaagtagacggatcgattttagtgagaaatttcatgtaattctttatatatcatgctgttaataatttgttttgaaaggtggcatagttcgtgcataataatcagcagtggctcattcaccttcttatgtcagccccttcgggaagcgctacataaacttcgaatgacgcacaaacaggtgcctgccgtccaactcctgataacagctctgctttatcagccatcgggcgaaacgtcgagtaaggcaccgcctcattccttaataaaggcaggctttagagcctgcctttattgtttctgccgtggatgtttccgccatcctcagttagcatcttcaggagctaatggttgaggctaattctttgaagcgattctctcttttcacccgttccttgcgccaactggtgacgctttcctttgtgctgatcatgctgccgctgctggtgcttgcatggcaggcatggcaaagcctgaacgcgctcagcgcccaggccgcgcatattaaccgcaccaccttgacggatgcgcggcgtagcgaagcgatggtcaatgcctcgctggaaatggagcgtagctatctccagtattgcgtgctggacgatcctacccttgagcgggtatatcaaaatcaacgcaagcgttatagcgaaatgcttgaggcgctctccggcgtgttgccggatgctcacatttggcagaccctgaggcagaacctcgccgacctggctaaactgcgttgccacaatagcgcgccggacgccaaagccgcggcgagcctcgaagcctttgccgatgctaacagtgaaatggtgcaatctacccgcacggtgattttttcccgcggccagcagctacagcaggagattgccgagcgcgggcagttcttcggctggcaggcgctggttctgtttctgctgagcctgacgctggtcttgctgtttacccgcatgatcatcggcccggtgaagggcatcgaaaagatgattaaccgcctgggggaggggaagtcgctggatgatgcggcgctgttcaccggcccgcgcgaactgcgatcggtcggtaaacggattatctggttgagtgaacgtctggcgtggctggagtcccaacgccatcagtttcttcgtcatctgtcacatgaactgaaaacaccgctcgccagcatgcgtgaaggtacggaactgctggcggaccgggtagcggggccgctgacgacggaacagcaagaaatcgttgagatcctcgataacagcagccgcaatctgcaaaagctgatcgagcagctgctcgactataaccgcaaactggccgatggcccggtcgagcggcagaaagtggatattgccgaactggcgcagaccgtcgtttccgcgcatagtttaccggcaagggccaagatgatgtctaccgagctggcgctggatgaacgcttctgcctggcggagccgacgttgctgaccagcgtgcttgataatctgtactccaatgcggtgcactatggcgctgaatccggtaacattcggattcatagttaccgccacggcgagcaggttcgtatcgatgtcgccaatagcggcgagccgatccccgtcgccgaaagaaatatgattttcgagcctttttatcagggaagccacctgcgtaaaggggcagtaaaaggtagcggtctggggttgagtatcgcccgcgactgcgtacggcaaatgcagggagagctgagtctggtcgatgataatcccgggttcatctgttttcgcatctcgctccccgccgctgagccgggaaaaaccaacacatgaatcaacattgggtgaatatgtccctctttttcgcattgcgccgtcctttacggggatggctgctgtcgggcctatgctgcctgacgctggcgggttgttccgccgctatgtcgccgcgcgccgcagacggcaatgcgccgcccgagctaccggaacatcaggtggcggattttctctccgtagattgcgccaatatctggtcgctggaaaacgatgccagtgataaaaacccgctgtactggctgcgcggcattgactgcgcggatcgcctggcgccggtacaggcccgcgccgaagccaaattgcataacgatgataactggcaggatgcgttgaaacgcggcattctgctggccgacgctaaaatcacccccgacgagcgtcgtgaaatggttgcccgcattgacagctttagcccgcaaatcgccgcgcaggttcgcccgctgtaccggctgtggcgcgacggccaggcccggcaattgcagttatttgaggagcgctcccgctacggcaaactccagcaatcgagcgatgccgaactggaaaccttgcgccaacaggagcaacagttgcgtagccaattggatctgaccacccgcaagctggaaaaccttaccgatattgagcgccagctctccagccgtaagcccggcggtaattttaatagcggtggcgataaggttccggaggtgatccatgacgatccgtaaacccgcccacctgctgctggtggatgacgatccggggctgttaaagctgctggggatgcgtctggtcagtgagggttatagcgtggtcaccgcggaaagcgggcccgaggcgctacgcgtgctgacgcgtgagcgggtggacctggtggtgagcgatttacgcatggatgaaatggacggtctgcagctgtttgctgaaatccagaaggcgcaacccggcatgccggtcatcatcctgaccgcccacggctctattcctgacgccgttgccgctacccaacaaggggtgtttagttttctgactaaaccggtcgataaagacgcgctatataaagcgattgatgatgctctcgagcagagctcgccggccaccgacgagcgctggcgacaggcgattgtcacccgtagtccacagatgctgcggctgctggagcaggccggtatggtggcgcagtcagacgttagcgtgttgattatcggccagagcggtaccgggaaagagattgtcgcccaggcgatccacaacgccagtccgcgccacgaaaaaccgtttatcgcgattaactgcggcgcgttgccggaacaattactggaatccgaactgttcggccacgcgcgcggcgcctttaccggtgcggtcagcaaccgcgaagggctttttcaggccgccgagggcggtacgctatttcttgatgaaatcggcgatatgcccgtcgcgctgcaggtaaagctactgcgcgtcctgcaggagcgcaaggtacgcccgctgggcagcaatcgcgacatcgacatcgacgtgcgcattatctcggcgactcaccgcgatctgccgaaggcgatggcgcgcggcgaattccgcgaagatctgttctatcggctcaatgtggttaacctgaagatcccgccgctttctgaacgggccgaggatatcccgctactggccaatcatctattgcgccagtccgccgaccgtcacaaacctttcgtgcgcgccttctccaccgatgcgatgaagcggctaatggccgccaaatggccgggcaacgtgcgtcagttggttaacgtgattgaacaatgcgtggcgctgacctcatcgccggtgatcagcgatgcgctggtggagcaggcgctggagggggagaataccgcgttgccgaccttcgtcgaggcgcgtaatcagtttgagctcaactacctgcgtaagcttatgcagataaccaaaggtaacgtgacgcatgccgcgcggatggccgggcgcaaccgcaccgaattttacaaactgctgtcgcgccacgagctcgacgccaacgactttaaagagtagccccgcggcatagcgcaagctatgatacggtaagcaaccggttacgcgacaaagacaggaaaaccatgaaaaagattgatgcgattattaaaccgttcaaactggatgacgtgcgtgaagcgctggcggaagtcggtatcaccggcatgacggtcaccgaagtcaaagggtttggtcgtcagaaagggcataccgagctgtaccgcggcgcggaatatatggtggattttctgccgaaggtgaaaattgaaatcgtggtgacggacgatatcgttgatacctgcgtcgataccatcattcgtaccgcccagaccggtaaaatcggcgatggtaaaatctttgtcttcgacgtggcgcgggtgattcgtatccgtaccggtgaagaagacgacgcggcgatttaatcctcgcgtatcgccgggtggcgctacgcttacccggcctacaaatccccgcgtcgttgggcttacagcaccttatgcgggccgaaacattcgtaatgaatgttgtctttattgacccctaattctaccagctgcttcgccgcaaactgcataaacgctaccgggccgcagagatagaattgcatctgcgggtcgcgaatattttccgccagcggcgctaaatccatcagaccttcgctatcaaaacgccctgcctgacggtcggcctcgctcgggctccggtaccaaacgttagaggtaaacttcggcaacgccgcgccaagcgccttcacttcgtccgcaaaggcgtgaacgtcaccgttttccgccgcgtggaaccagttcacctggccctgatgatggcttttcgccagcgtatccagcatcgccagcattggcgtttggcccacgccgccggagagcagagtcaccggcgtctgcgcttccacgttgaggaagaagtcgcccgccggcgcggctaaatagaccacgtcgccttcgctggcgtggttatgcagccagttggacacctggccgccattctcgcgtttcaccgcgatacgatagcctttaccgtccgctttgcgggtcagagagtattgacgaatttcctgatattcgaaggcttccggcttcaaccagatagccagatactgtcctggctggtaatcggcgaccggctgaccgtcgacaggttccagttcaaagctggtaataagctggctgcgcggagtcttcttaataatgcggaacgcgcgggtgccttcccagccgccatttttactggcgttatcctgatagatctccgcttcgcggttgatgaagacgttcgccagcaccccgtaggctttgccccaggcgtcgagcacttcctggcccgggctaaacatttcgtcgagggtcgccagcagatgactgccgacgatattgtactgctccggtttaatctggaagctggtatgtttctgggcgattttttcgaccgccggcagcagggccggcagattgtcgatattactggcgtaggcggcgatagcgttgaacagcgcttcgcgctgatcgccgttgcgctggttactcatattgaagatctctttgagctccgggttatgagtaaacatgcggtcataaaaatgcgcggttagctttgggccggtctctacaagcaggggaatggtggctttgaccgtggcgatggtttgagcgtcgagcatagcagcttccttaaatattatcctattgatgcatttcaaatgcatcttatataaataaccctgctatgtaaatggttctttatcactttgccgcaaagcagttacaacatgaagaatttgcatcacaaacctgaaaagaaatccgttgataatgtttgatgcgttattgctcaaagccttgtgtgctgtggagccaatcgtttgcgtaaaatcctttgtcaagacctgttatcacagaatgattcggttatactgtgggccgttgtccatcaggaccgcctttttaggccaaaattttatcgttagctgagtcaggagatgcggatgttaaagcgtgaaatgaacattgccgattatgatgccgaactgtggcaggctatggagcaggaaaaagtacgtcaggaagagcacatcgaactgatcgcctccgagaactacaccagtccgcgcgtgatgcaggctcagggttcccagctgactaacaaatatgccgaaggttatccgggcaagcgctactacggtggctgcgagtacgtggatatcgttgagcaactggctatcgaccgcgcgaaagaactgttcggcgccgactacgctaacgtgcagccgcactccggctcgcaggctaactttgccgtctacaccgcactgctgcagccaggcgataccgtgctgggtatgaacctggcgcaaggcggccacctgacccacggttccccggtaaacttctccggtaaactgtacaacatcatcccttatggtatcgatgagtccggtaaaattgactacgaagacatggcgaagcaggcccaggagcacaaaccgaagatgatcatcggtggcttctccgcttactccggtatcgttgactgggcgaaaatgcgtgaaatcgctgacagcatcggcgcatacctgttcgtcgatatggcgcacgtagcgggcctgattgccgccggcgtttatccgaacccggttccgcacgcccacgttgttactactaccacccacaaaaccctggcgggtccgcgcggcggcctgatcctggcgaaaggcggtagcgaagagctgtacaagaaactgaactccgccgtgttcccaagtgcgcagggcggcccgctgatgcacgtaatcgccgcgaaagcggtggcgctgaaagaagcgatggagccagagttcaaagtttaccagcagcaggttgccaaaaacgccaaagcgatggtggaagtgttcctgaaccgcggttacaaagtggtttccggcggtactgaaaaccacctgttcctgctggatctggtagataaaaacctgaccggtaaagaagctgacgccgccctgggccgcgccaacatcaccgttaacaaaaacagcgtaccgaacgatccgaagagcccgttcgtgacttccggtatccgtatcggttctccggctgtgactcgccgcggctttaaagaagcggaagtgaaagagctggctggctggatgtgcgacgttctcgacaatatcaacgacgaagctgttattgagcgcgtcaaaggtaaagtgctggatatctgcgcccgtttcccggtttacgcgtaatcttgccgcgttaagataaaaaaggccgcgattgcggccttttttgtgtctgcttgttatcgacggtccagcgaaatcgaacctggtccggttatcgccagcagcaggaaggccccggcgatactgacgttcttataaaagttaatcatattcggcaataccgcatcgccggtcatatcccagtaatgatggccaataaccgcggtacccaaggtgtaaaagataaagatcaccgccagcgggcgggtgaagaaacctaaaataatcagaatagcggcgggcacctccatgatgaccgcgatgatcgccgccagcgtcggcatcggcgcgccggaagaagccatatactgtaccgttccgctaaaccccatcagtttcggatagccaaaaataatgaacagcagcacgatcgcaatacgtgcgattaacagcagaacagggcgggaagagccaaagtcaaaatagcgtagcgtgttcataatcagtcctttatcacaggcgtgtgatctaaacgtaatacacatttttactccccgccacgctgggaaagtaatattgttgcgcctcgttgagcggcgattaagccgatacgagggaagcgctctgatgcccggttatcggattttttttcatacatgcccgccatgtcgcacgctcatcgcgtgacaatgctcacgattttaagagaaatgtacttaacgaccatgaagatagtgagacatgggtttgctcagtatgcgctttatcgccagactagaacttccattcgggagggaatcatggtcttgcactccacgcgctggctggcgctaagttacttcacctacttttttagctacggtatttttttaccattctggagcgtctggctggcaggcgttggcctgacgccggaaaccataggcgtgctgctcggcgctgggctggtggcgcgttttctgggcagcctgctaattgcgccgcgggtcagcgatccttctcgtttgattagcgccttgcgtatcctggcgttgctgacgctgctgtttgctctcgccttctgggtcggcgggcaggtggcctggctgatggtggtcatcgtcggattcaacctctttttctcgccgctggtacccttaaccgatgcgctggccaacacctggcaaaagcagatcaccatggattacggccgggtgcgattgtggggatcgattgcttttgtcatcggttctgcgctgacaggcaagctggtgagtctgtttgattaccgggcgatcctgttgttgttaagcctgggcaccgcttcgatgctgttgggcatgctgctgaaaccttcagtgatgccgcaggggagagccgccatcaggaggcggccggactaccggcgtggcttagcctggtgcggcaaagctggcgttttctagcctgcgtctgtctgttgcagggggcgcatgccgcctactatggcttcagcgcgctatactggcagcaggccggttattcagcctccgccgtcggctatttatggtcgctcggcgtcgtcgccgaagtggtgattttcgccctgagtaaaaaagtgttccgccgctttagcgcccgcgatctgctgctgctctcggcggtgtgcggcgtggcgcgctggacgattatgggctggacgaccgcgctgccatggctactggtcgcgcagatcctccactgcggaacgtttaccgtctgtcatctggcggccatgcgctatatcgccgcgcggcaggggagtgaggttatccgtctgcaggccgtttactcggcggtggcgatgggcggcagcatcgcagtgatgacggtgtttgccggcttcctctaccagcacctgcatcagggcgtcttctgggtgatggcgctggtggcgctaccggcgctgatcgtgcgaccgaaggcggtgagcgcctaatcctcaagcattttgcaaatctgctgccgctggtgatcgctaaaattctcttcagcatgaaacagcggcggcgaaaacagcggtagcgcggtggtgtaaggtgtgaccactaaagtcacatccttcggcgcgccttgttgctgaaaatgggccacgcttaagtatttaatattcagcggcagcagcgtcaattcccgcaattgcatttccagcgcctgttccagttcgctattttcccgcgtcagcagcactacctgcttttcatgcaggtcggctttttgcatcaaccacgcgccgaaaatcaccgcgattaagctgacctcttcctgattaaatttaatatgataggccgcttcgaaatcgcgtaatgcgtcctgggtggtacgcatcaggcgcggatacaggcgtccgatctcttccggtaaggcattatcaataccgatggcgaatacgctgcggttcaacgcctgcgaaagatggatatagagctggtcgctcaacccttgttcatcgctgaatggccgtcccgccagatcctggaaacgatggatcaagcgggagatcgccagatgcaggcgtctgtcctgttgatggccgtcgtgaatgggatccggtgttttcagtaacataaacagcagggtcagaaacagttgttcgccggcgtgtggcgtggcgctgacccggcgctgccagtggcggacgatttcggcggcgaggttaaattccgctgcggcctgcgcccaattgcgttgctcacgggtgaaatccggcgactggcccagatgatgttgtagcaggcagtactgaagatacagacgcaggaactgtccatcccggcagtcaaactgccgattgagcgcgcgcgcgcagcgattcaccaacgcctgaagattggtatcatcatataaggttcgcgcgataccctgctgtttaagctgcgtttttaacgccggggtaaaatggtgatgaacgaaatgcgggcacaggcgtagcccacgccggagagcgtgcagcaggcacaggcgttgatcgagcgcggcgccttcaatccgatagctgccgtccatctgcgacgcgagagtcagtcgatgataacgctgaatttcgcgccccgtctccgcgatatcctgttgggccgtcgcctcatccacctggttgagcctgaccagctgttgcggcgtgacggattgtcccggaagatagaacatcaggagcacctggctacggcgctgtggactggaaagcgcagatggtggttcaatcactgtcatcatctggtaagttccagttagggtttcagctaagaatagccaaaggatgcagggtgagcagggcgggccgcggcctttagatcaggattgctggcgaagttcacagaatttttcacgcgaggaacagatgaagagagtgaaacactgcgtcggtgcggcatttttcatggttttatcattgtcagccgttgcgcatccgcacagcttcattaatttgcagagtgaagccgtggtgaaagacggtctgttgaccggctttaagatgcgctggacgatggacgaaataacttcagcggatctgctctatgatgccggtaatgcaaaggcgggcagcgaagtatggaaaaaactggcggcggaggtcatggccaatgtactcggccagcactacttcagcgaactgtggcacaacggtcagcgggttaagtttgctaaccgcccggatggctacggccttgctcgtagcgggctgcaggcggtactcaccttcaccttgccgctggcgacgccgcaacctgttgccggacaaacctttactttatccaccttcgatccgacctactacgtcgatatgttttatgagcaggatagcgattttgcgttgcctgccgcgctgcgggcctcctgcaaggccacggtaatgacgccgaaacccaacgacaaaatgttgtcttatgcgcagtcgctcgataaagaggacgcgccgccggaagatatggaactgggtaactacttcgcccagaaggtgaccttgaaatgtcagtagtctttacgccgcgagcgcgggcgctgcgctggaaatcactctggccgctggcgctgtttctgacgctaaccgtcgtgggcggtatctggttgtggctcgcctggccgcaggtactgttgcaaagcgcggtctggcagcgttcactgaatcttgagctcagccaactgctgcaggcggtggcggataatccgtcagcggcggggctgtcactgctcgggttcagttttgtctacggcgtgctacatgccttaggccccggccacggaaaaatcgtgattaccacctggcttgccacccatccctcaaagttgaaatcgagtattgcgctgacgctggctgcatcgctgttgcagggaatggtggcgatagcgctggtggtggtggtattgacgctgctgcagcttccggcgcgtcaactgcatctcagcagcttctggctggagaagggcagttacctgctggtcggcgcattggggcttttactgtgctggcgggcattgaaaaaactgcgagtcttgctgcggcggccaacatttaccgcttttaccccgcagcacgtccatgatgaacattgcggctgcggccatcagcatctcccggctccggatcaactacagagtggcgacgactggcgggccaggctggcgattgtgctgtcgatgggcatgcgtccctgctcgggagcgattatggtgctgctgttcagtaaggtgatcggcgtctttggctggggcatggctgccgcactggtaatggcggcgggaacgtcgctgaccataagcgggctggcactattggtgcatggattccgccagttggctatccgcctgagtcgccatcagacgccggcgatgtggaaacaggttggctgggcgacgctggcgctggccggtggcgtggcgctgttgacggctgctgtcgtgatgtggagtagcgcgatcccgccgggcggcggcttgcgtccgttttagggtataaaaaaaggaagccgcggcttcctttttacattcagtgagaaattaacgcttcagcgcttcgctcagctgctcgcgcatgttcgccagcatcgctttcacgacgcgcgggttaccggctacgatgttgccggtcagcatatagttatgaccaccggtgaagtcgcaaacgatggcgcctgcttcacgagcgatcagttcaccagcggcgaaatcccacggtttgagggcgatttcaaagtaaccgtcaacgcggccagcggcaacgtaggccagatccagggcggcggaaccggtgcgacggaagtcagcgcactcggtgaacatgttgccgaggatgttcatgtaagcggtagcgtgctgcttcgctttgaacgggaaaccggtggcgatgatagtaccgtcgagatcgcgagcgttgctgccgcgcagacggtagccgttcagctgcgcgccctgaccgcgggtggcggtgaacagttcattacgcatcggatcgtaaaccaccgcgacttcagtacggcctttaatgcgtacggcgatggaaacagagaagtgtggcagacgtttaacgaagttggtagtgccatccagtggatcgataacccattgaatatcctgatcttcaccagcgtgctcgccgctttcttcggtgatgatggtgtgctgtgggtaagacttgcgaatggtttcgataataatcgcttctgcggctttatcgacgttagtcacaaagtcattgctgcctttctggctggtttctacggaatctggcgtttcgtagtgcttggcaattaaattacccgccttgcgcgctgcgcgcacggcaatgttcagcatcggatgcatcggtatctctcactggatgttaaagaacgggaaaaaacggcgcatatagtaacagcgaattctgcttatgtctccgttttatgttagcatgcacgaataatctttagccgaagaaccataatgctgcaaaatattcgaatcgtactggtagaaacctcacacaccggcaatatgggctccgttgcccgcgcgatgaaaaccatgggcttaactaacctgtggttggtcaacccgctggtgaaacctgattcccaggccatcgcgctggccgctggcgccagcgatgtgattggcaacgcgcagatcgtcgatacccttgatgaagcgctggcgggctgtagcctggtggttggcaccagcgcgcgctcccgcacgctgccgtggccgatgctggatccgcgcgaatgcggtctgaaaagcgtcgccgaaggtcagcatgcgccggtcgcgctggtctttggccgcgagcgcgttggtctgactaacgacgaactgcagaagtgccactatcacgtggcgatcgccgccaacccggagtacagctcgctgaacctggcaatggcggtacaggttatcgcctatgaagtgcgaatggcctggctggcgactcaggagcaggcgcagccggcgattgaacatgaagagacgccgtatccgctggtcgatgatttagaacgtttttacggccaccttgagcagacgctgctggcgaccggttttatccgcccgaatcatccggggcaggtgatgaacaagctgcgtcgtctgttcacccgcgcgcgtccggaaagccaggagctgaacatcctgcgcgggatgctggcgtctattgagcagcagaataaaggtaagtaagcgcgttaacgccggatggcgcttcgcttatccggcctacgaatctatatctctgttgtagcccgggcgaggcctttggccgaccccggggcggctcgaaatcaataacggcacggaaagccaaatacctgactaaaacagtcaagtaaatagttgaccaatttactcgggaatgtcagacttggccctgctatgcaatacccatattaataaaaagcccgggcaggggcgagtttgaggttaagtaagacatgagactgacatctaaagggcgttatgccgtgaccgcaatgcttgacgttgcgctcaactctgaaacgggtccggttccgttggcagatatttcagagcgtcagggaatttcgctttcctatctggaacagctgttctctcgcctgcgtaaaaatggtctggtatccagcgttcgtggaccaggcggcggttacctgttaggtaaagaagctggcagcatcgccgtaggcgaagtgatcagcgccgtagacgaatccgttgacgccacccgttgtcagggtaaaggcggctgccagggtggcgataagtgtctgactcacgcgctgtggcgcgatctgagcgaacgtttgaccggtttcctcaataacatcaccctgggcgaactggtgaataaccaggaaatcctcgatgtttccggtcgtcagcacaatcatgaatctcagcgtactacgcgttctcaggacgccattgacgtaaaactgcgcgcctagcacgaggcttagtttcagcttgcggctctcgggctgcaaggtgaaacggcagggtagatagcaataataaagattttcagaatcaggccgggatgttgaaacatctcgtgtactcggtcgtacatcaagccggttgcctggttccttgcattgagtgatgtacggagtttaagagcaatgaaattaccgatttacctcgattactccgcaacaacgccggtggacccgcgtgttgccgagaaaatgatgcagttcctgaccctggacgggacctttggtaacccggcctcacgttctcaccgtttcggttggcaggctgaagaggcggtagatatcgcccgtaatcagattgccgaactggtcggtgccgatccgcgcgaaatcgtctttacctccggcgcaacggaatccgataacctggcgattaaaggtgcagccaacttttatcagaaaaaaggcaagcacatcatcaccagcaaaaccgagcataaagcggtactggatacctgccgccagctcgagcgcgaaggttttgaagtgacctaccttgctccgcagagcaacggtattatcgatctgaaagaactggaagcggcgatgcgtgacgacaccatcctggtttccatcatgcacgtgaacaacgaaatcggcgtggtgcaggatatcgctaccatcggcgaaatgtgccgcgcccgcggtatcatttaccacgttgacgccacccagagcgtgggcaagctgcctatcgatctgagccagctgaaagttgacctgatgtccttctccggtcacaaaatttacggcccgaaaggtatcggcgcgctgtacgtacgccgtaagccgcgtatccgcatcgaagcgcagatgcacggcggcggtcacgagcgcggcatgcgttctggcaccctgcctgtacaccagatcgtcggtatgggcgaagcttaccgtatcgccaaagaagagatggaaagcgaaatggcgcgcctgcgcggcctgcgtgaccgtctgtggaacggcgtgaaagatatggaagaagtctatctgaatggcgaccttgagcagggcgcgccgaacattcttaacgtcagcttcaactatgttgaaggcgagtcgctgattatggcgctgaaagacctggcggtttcctccggttcagcctgtacttctgcgagcctggagccatcctacgtgctgcgcgcgttaggcatgactgatgaactggcgcacagttctattcgtttctctttaggtcgtttcactaccgaagaagagattgactacaccatcaatctggttcgtaactccatcggccgtctgcgcgacctttctccgctgtgggaaatgttcaaacagggcgtggatctgaacagcattgaatggtcacatcactaatcggtaccgataaggagaatttatcatggcatacagcgaaaaagtcatcgatcattacgaaaacccgcgcaacgtcggctctttcgacaacagcgacgacagcgtcggtagcggtatggttggcgcgccggcgtgcggcgacgtcatgaagttgcagattaaagtcaacaatgaaggtatcattgaagacgcgcgcttcaagacctatggctgcggttccgctatcgcttccagctccctggtcaccgagtgggtgaaaggtaaatcgttggacgaagcgcaggctatcaagaacaccgatatcgccgatgaactggaactgccgccggtgaaaattcactgctctatcctggcggaagacgcgattaaagccgcgattgcggattacaaaagcaaacgtgaagcaaaataattaagagttgaggtttgttatgtcgattaccttaagcgacagtgcagcagcgcgagtcaattccttcctggcgaaccgcggtaaaggctttggcctgcgtctggggtaagaacctccggctgttcaggtatggcttatgtactggaatttgttgacgagccggcggcagaagacaccgtgtttgaagacaaaggcgtgaaagtcgtgatcgacggtaagagcctgcaattcctcgacggcactcaactggacttcgtcaaagaaggccttaacgaagggttcaaatttaccaacccgaacgtgaaagatgagtgcggttgcggcgaaagctttaacgtataatcggtaatccccaaccccaccgcggtcacgccgcgcgtggggttttagtttagatgcatgaccctgaggttactatggactatttcaccctcttcgggttaccagccagctataccctctcgcttgaacaactggctgtccggtatcaggatctgcagcgccagtaccatccggataaatttgccagcgcgcccgctgcggaacagttggctgcggttcagcactccgccaccattaaccaggcctggcagactctgcgtcatccgttgacccgtgcggaatatctcctttcgctgcacggttttgacctcgccagcgagcagcacaccgtacgcgacaccgcgttcctgatggaacagttggaactgcgcgaagagctcgatgaaatcggccaggcgaaagatgaagcgcggctggaagcctttatcaaacgggtaaaagccctgtttgatacccgccatcagctgatggttgaacaattgcaaaacgagacctgggatgcggcggctgatactgtacgcaagctccgttttctcgataaactgcgcagcagtgctgaagaactcgaagaaaaactgctcgatttttaattttcggaagcaattatggccctattacaaattagtgagcctggtctgagcgccgcgccgcatcagcgtcgattggcggcaggtattgaccttggcaccaccaattctctggttgctaccgtgcgtagcggccaggccgaaactctgcccgaccatcaaggccgttacctgttgccgtcggtcgtgaactaccacgcctctgggctgactgtcggctatgaagcccggctgaatgccgctcaggatccggtgaacaccatcagctcggtgaagcgaatgatggggcgttccctcgccgatattcaaacccgctatccgcatctgccataccagttgcaggccagcgaaaatggactgccgatgattcagaccgccggtggcctgctgaacccggtgcgggtctccgccgacatcctgaaagcgctggctgcccgggcgaccgaagcgctggcgggcgatctcgacggcgtggtcattaccgttccggcctatttcgatgatgctcagcgtcagggaaccaaagacgccgcgcgtctggcgggcttgcacgtgctgcgtttgctcaatgagccgaccgcggcggctatcgcctacggcctcgattccggccaggaagggtgattgcggtttacgatctcggcggcggtacctttgatatctccattctgcgcttaagccgcggggtgtttgaagtgctggcgaccggcggtgattccgctctcggcggcgatgatttcgaccatctgctggccgactatctgcgcgagcaggcgggtctcagcgaccgtagcgataaccgcctgcagcgtgagctgctggatgccgccattgcggctaaaatcgccttgagcgatgccgacgtggcgcatgttgagatcggcggctggcagggcgatattacccgtagccagtttaacgatctgattgccccactggtaaaacgtactctgatggcctgccgtcgcgcgctgaaagacgccggcgttgaagcgcaagaagtgctggaagtggtgatggttggcggatccacccgcgtgccgttggtgcgtgagcgcgttggcgaattctttggccgtgccccgctgacctctatcgacccggacaaagtcgtcgccattggcgcggcgattcaggcggatattctggtcggcaacaaaccggacagcgaactgctgctgcttgatgttatcccgctatcgctagggctggaaaccatgggcggcctggtagagaaagtgatcccgcgtaataccaccattccggtggcccgcgcgcaggaatttaccactttcaaagatggccaaacggcgatgtctattcacgtgatgcagggcgagcgtgagctggtgcaggattgccgctcgctggcgcgttttgcgctgcgcggtatcccggcgctgccggcgggcggggcgcatattcgcgtgaccttccaggttgatgccgacggtctgctgagcgtcacggcgatggagaaatcgaccggcgtggaagcctcaatccaggtgaaaccgtcttacggcctgaccgatggcgaaatcgccaacatgattaaagattcgatgagctacgccgaacaggatattcaggcgcgtatgctggctgaacagaaagtcgaagccgctcgcgtactggagagcctggaaagcgcgctggccgccgacgccgcgctgttaagcgccgcagagcgtcaggttatcgatgccgccgcggagcaagttcgcgccgccgcggcaggcgaagatgccgacgcgattaaagaagccattaaaaatatcgacacacaaacccaggaattcgccgcacgccgcatggaccagtcggtccgcgctgcgctgaaaggccaatccgtggacgaggtttaaaatgccaaaaattgtttttctgccccaccaggacctgtgcccggatggcgtagttgtggaagctgagagcggtgaaaccattctggatgcggcgctgcgtagcggtatcgagattgaacacgcctgtgagaaatcctgtgcctgcaccacctgccactgcatcgtgcgtgaaggttttgactcgctggcggaaagtagcgaagatgaagacgacatgctggataaagcctggggctggaacctgacagccgtctgagctgccaggcgcgcgtcaccgacgaagatctggtcgttgagatcccgcgttacaccatcaaccacgcacgcgagcactaatatggcactgaaatggaccgacagtcgcgaaatcggcgaagccttgtatgacgcttacccggatctcgacccgaaaaccgttcgcttcaccgatatgcatcagtggatttgctccctggaagagttcgatgacgacccaaacgcatccaatgaaaaaattctggaggcgattctgctagtctggttagacgaagcagaataactttcgcctcaagcggaataattttaacgggctgccatagggtggcccgtttgctaataaggataaagataatgaccgaagccatgaagattacgctttctactctgcctgccgatgcgcgctggggagaaaaagcgacctggagtatcaataacgacggtatcgccttacatctcaacggtaaagacgacctgggtttaatccagcgcgcggcgcgcaaaattgacggcatgggtatcaagcacgtcgccctgaacggcgaaggctggaataccgatcgcgcctgggccttttgggccggctataaagggccgaaaggtcagcgccaggtcgaatggccaaccctggacgacgcgcagcgcagcgagctggataaccgcctgacgattatcgattgggttcgcgataccatcaacgcgccggcggaagagctggggccggaacagctggcgcagcgcgccgtcgatctgctgtgcggcgtggcgggcgaaaaggtcagctatcgcatcaccaaaggcgaagatctgcgcgagcagaactatcttggcctgcataccgttggccgcggctccgagcgcccgccggtcctgctggcgctggactacaacccgaccggcgataaagacgcgccggtatacgcctgtctggtcggcaaaggcatcaccttcgactccggcggctacagcatcaagcaaagcgcctttatggattcgatgaaatccgacatgggcggcgcggccactgtgacgggtgcgctggctttcgccattaaccgcggtctgaacaaacgtgtgaagctgttcctgtgctgcgcggataacctgattagcggcaacgccttcaagcttggcgatatcattcattaccgcaacggtaaaaccgttgaaatcatgaataccgacgccgaaggtcgcctggtgcttgcggatggcctgatcgacgcctcggcgcagaagccgcagctgatcatcgatgccgccaccctgaccggcgcggcgaaaaccgcgttgggtaacgactaccacgcgctgtttagctttgacgacgcgctggcgaatcgtctgctggcgagcgcgcaggcggaaaatgaagccttctggcgtctgccgctggccgaattccaccgcaaccagctgccgtctaacttcgctgaactgaacaacaccggtagcgcggcgtatccggccggcgccagcaccgcggcgggcttcctgtcccacttcgtggaaaactaccatcagggctggctgcatatcgactgctccgcgacttaccgtaaagctgcggttgaacagtggtcggcgggtgcgactggccttggcgtgcgcactatcgctaatctgttgacggctgagtaatggccttgccgggggcgctacgcttacccggcctggaaaaccgtaggcccgcgcggacgggcgatttttgaagtagcgaatctatgtctgatactaaaaatgaattagaaactctgctggagaaggcggcgaccgagcctgcccatcgtccggcatttttcaccgcgctgcttgaggccaccgtatgggtgccgggcagcgcggcggacggcgagcagattgtcgaagatagcgccctcgatcttcagcattgggaaaagaagacggcacgtcggttattccgttctttacctcgctggaggcgctgcagcagacgatagaagacgaacaggctttcgtgatgatgcccgcccgcacgctgatggcgatgacgctgggcgaatcgctgttcctcaacccgaagctgccgagcggcaaagaattcaccccgcgggaaatcagccatctgctgggtgaagagggcagcccgctcagtacccagacggtactggaaggcggcgaagcgctgctgttgtctgaagtcgccgaaccgccggcgcagatggtggattcgctgaccacgttgttcaaaacgctgaagaccgtcaagcgggcgtttctgtgttcgattaaagagagcgccgacgcgccggccaacttgttgatcgggattgaagcggaaggggatattgaatccattatccagaccaccggcagcgtggccaccgataccttgccgggcgatgaacctatcgacatttgccaggtggtagaaggcgagaagggcatcagccactttatgattgcccatattacgccgttctatgagaagcgttggggcagcttcctgcgcgatttcaaacagaatcgtattatctaaagccaaccgggtagggcgcagccactacccggatattttacctttactgcgccggctcgatcggcaaatccgttctcgcgcccattcgctccacgatccatcgtacaggcacacgccgttgacgccgagcgtggtcaacgccagtaccaccactgccgccgttaccccggaaccgcagctggcgataatcggtcgtgaaaaatcaacgccctgacgcttaaagatatcgttcatctcatcaacggttttcagttcgccattaatcaccagctcggtccatgggacgttaagcgcgccggggatatgcccgcggcgtaagcctggacgcggttcatccgccagcccgttaaaacgcgccgccggacgggcatcaacgatctgcgccgatccttcatggctgaccagcagcacatcggttaagcgtttgatcacctccggatcgaagttcacctcaaattcgccttccggcaggtcgggttcgcctttctccagcggcaattcatcgcggtgccagccttcgaggccgccggcgacaatcgacaccctttcgacgccgaaggtacgtagcatccaccacgcgcgcggcgccgagaacagattgccttcatcataaaccaccaggtgcttatcgctgctgacgccaagctcgcgcatcgccacggcgaaagtttccgcacgcggcatcatatgcggcagcgggctggtgtggtcagacagcgcttcgatatcaaaaaaaaccgcgccggggatatgcccgccgcggtattccgccgccatatcgcgcagcgcttcctgacccgccggcgccatccgcgcatccagaatttgaatctgcgggtcatcaatatgttccgccagccagtcggccgcaacaaagaatgaggtggacatgagtgcctccgttttattatcgatcgatgaattgtcggcgttttataaagggctgacaagttaaggtcgcggtagtggggaggtggtcacgtagtttcccgattcatcggtggtttctatgctggtagctgttgagaatcgccgcgatgacgcataatagaacgttattgattgcatcaggctttgggcctaggggttagaaggatgaaaccatttcgtttagcggcgctatcgctggcgctccttaccgcactatcattaagcggctgcgataacagcggtgaaccgcaggccgtatcggcggccgataaaggcgctgccgatagcgcgaaaaagccggatagcgcgcagttggcgacgttaaaagaaaaaagccggggcaaggcgctgacgctgctcgacgcttctgaagtgcagctcgatggcgcggcgacgctggtgctgaccttctccattccactcaagccggatcaggatttctcccgcagcgtccatctggtcgacaagaaaagcggcaaggttgacggcgcatgggagctagcgccgaatctcaaagagctgcgcctgcgccacctcgaaccaaagcgcgaattgatagtcaccgttgatccaacgctcattgccctcaatgacgccaccctcggcagcccttttgaaaaaaccatcgccactcgcgatatcgcgccgagtgtcggtttcgccagccgcggctcgctgctgccggggaaagtggtcgccgggctgccggtgatggcgctgaacgtcgacaatgtcgatgtcaatttcttccgtattaagccggaatcactctcagccttcgtcagtcagtgggaataccgtaactcgttaagtaattgggaatcagacgaactgttgaagatggccgacctggtttatagcggacgcttcgatctcaacccggcgcgtaatacccgtgaaaagctgctgctgccgcttaacgacatcaagccgctccagcagccaggcgtctatgtggcggtgatgaacccggccggtcattatagctacagtaacgcggcaacgctgttcaccctcagcgatatcggcgtctcggcgcatcgctaccacaaccggctggatgtcttcacccagagcctcgaaaatggcgccgcgcagtcgggaattgaagtgcaattgctaaacgccaaagggcagacgctggcgcaggcgaaaagcgatagccagggtcatgttactctgcaaaccgataaagaggcggcgctgctgctggcgcgaaaagacgggcagactacgctgcttgaccttaaactgccggcgctggatctggcggaattctccatcgctggcgcccctggcttcagtaaacagttctttatgtttggcccgcgcgatctctatcgcccggggaaacggttatccttaacgcgctgttgcgcgacggcgatggaaaaccgctggcggagcagccggttaagctggaagtggtgcagccggatggccaggtgattcgctctgtgatgagcaaaccggtcaatggcctgtatcagtttacttatccgctcgacagcggcgccgccaccggtatgtggcacattcgcgccagcaccggcgataatcaacccgcgagtgggatttccacgtcgaagactttatgcccgaacgcatggcgctgaatctgacgccgcaggccgcgcctatcgccccggatgccgacgtcgcctttagcgtcagcggcgcctatctttacggcgcgccggccagcggcaatcagctgcagggcaaactgttcctgcgtccgctacgcgacgccgtagctgcgctgccgggcttccagtttggcgatatcgcggaagaaaatctctcccgtagcctggatgaagtgcagctgacgctggatgaaaaaggccatggagaagtgactaccgcaagccagtggcaggatagccattcgccgctgcaggtcgtgttgcaggccagcctgctggaatcaggcggccgtccggtgacccgtaccgtacagcagccgatctggcctgccgaggcgctgccggggatccgcccgcaatttacgctgaaggacgtttacgactaccgcaccgataccacggtgaaacagccggtagtcgatgaaaacagtaacgccgcttttgacatcgtctatgccgatgccagaggcgagaaaaaagcggtctccggtctgcaggtgcggctgatccgcgagcggcgcgattactactggaactggtccgatagcgaaggctggcagtcgcagttcgatcaaaaagatctgcaggagggcgaaacgtcgctggatctgcaggccgggcagataggtaaagtgagtttcccggtagagtggggctcgtatcgcctggaggtgaaagggccggacgacgttgttagcagcgtgcgcttctgggcgggctacagctggcaggataacagcgaaggcgccggcgcggcgcgtcctgaccgcgtaacgatgaagctcgacaaaccaggctataaaccgggcgacaccatcaagctgcatattgccgccccggccgcgggtaaaggctacgcgatggtcgaatccagcgaagggccgctgtggtggcaggaaattgacgtcccggcggaggggatggacctgtcgatcccggtggataaagcctggaatcgccacgacctctacctcagcacgctggtggttcgccccggcgataaatcgcgatcggcgacgccgaaacgcgcggtcggcctgctgcatctgccgcttggcgatgaaaaccgccgtctgtctctggcgctggaggcgccggagaaaatgcgcccaaatcagcctctgacggtgaaagtgaaggccagcgttaaagagggcgaggtgccgaaacaggttaacgttttgctctcggcggtggatagcggggtgctgaatattaccgattacgccacgccggatccatggaacgccttctttggccagaaacgttacggcgcggatatttatgacatctacggccaggtgatcgaagggcaggggcgcttagccagcctgcgcttcggcggcgatggcgacgagttaaaacgcggcggcaaaccgccggttaatcacgtgacgatcgtcgcccagcaggcgcagccggtggtgttgaatgaccagggcgaaggcacggtgacgttgcccatcggcgattttaacggcgagctgcgggtgatggcccaggcgtggacggcagatgacttcggcagcagcgaagataaagtggtggttgccgccccggttatcgcggaactgaataccccgcgcttcctcgccagcggcgacgccacgcgtctggcgctggatctcagtaacctgaccgacaaaccgcaaaccctgcaggtacatcttaccgccagcgggttggtaacgttgtccgatggccaactgccgccggtacagctggcgccgggtgcgcgcagcacgctgtttataccggtgaccgcgttagcgggattcggcgatggtcaggtcaatgccactatcagcggcctgaacctgccgggcgaaaccttcgcgccgctacaaaaacagtggaaaatcggcgtacgtccggcattcccggcacagaccgtcaatagcggcgcggtgctgcaacctggcgaaagctggcaggcgccggcggcgcagagtcagggtttcgccccgcaaacgctgcagggccaactgctgctcagcggtaaaccgccattgaatctcgcccgctacatccgagagctgaaagcctatccatacggctgccttgagcagaccgccagcggcctgttcccttctctgtacaccagcgcggcacagctaaaagcgctgggcatcagcggcgatagcgatgagaaacgccgcgcggcggtcgatgttggtatctcgcgcctgctgcagatgcagttggaaaacggcggttttgcgctatgggataaagagggcccggaagagtactggttgaccgcctacgccatggacttcctcgtccgcgcaggcgaacaaggctataacgtgccggtcaacgcgattaataagggcaacgagcgcctgctgcgctatctgcaggaaccgggtttgatgaccgtgcgctacagcgacgatgcccaggccagccgctttgccgctcaggcgtacgccgcgctggtgttggcgcgccagcaaaaagcgccgctcggcgccttgcgtgaaatctggagtcgtcacgaacaggcgcgttctggattgccgctgctgcaactcggtattgcgctgaaaaccatggggatgcgccgcgcggcgctgaggccatgaagctggcggtagccacgccgcgccaggatgagaatcgttggctgggcgattacggcagccaacttcgcgatgatgcgctgaagctggcgctgctggaagagaacaagctgctgccggaggtgcaaaaccagctgttgagcaatttgtcggaagaggccttcggtcagcgctggctgtcgacgcaggaaaccaacgcgctgttccttgccgggcgtacgcttgccgacctgccgggcaactggcaggcgcaaacgtcgcttcaggcggacccgcttgccagcgacaaagcgcaaacccgcaatctcgacggcgatcggctggcggcactgcaggtgacaaataccggcaatcagccgctgtggctgcgcctcgatagcagcggttatccgcaaagcgcgccacagccgggaggcaacgtgttgggaattgaacgcgctattttcgatacccacggccagcagaaatcgctgacttcgctgcgcagcggcgaactggtgctggttaagctggaggtgaccgccaaacgtaacgttcctgacgcgctggtggtcgatctcctgccggcgggacttgagctggaaaaccagaacctggccaatagcagcgccagcctgcaggagaatggcgaagcggtacaaaacctgcttaaccagatgcagcaggcggatattcagcatatcgagttccgcgatgaccgctttgtcgccgccgtcgccatcaatgaaggtcagccggtgacgctggtctatcttgcgcgggcggtgacgccgggtacctatcaggtaccgcagccgcaggtggagtcgatgtatgtaccgcagtggcgggcaacaggggcggccagcggcccgcttaccgttacgccgtaaatgcgtgcattacctcgcataaaacgccgctggcgctggctggcggcgtttatttttctgctgtggttagcggtgctgctggccgatcgtctttggccgctaccgctgcatgaagtcacgcccgcccgcgtggtggtggcggaagacggcacgccgctgtggcgctttgccgatgcgcagggcgtctggcgttatccggtcaccatcgccgacgtttcgccgcgctatctgcaggcgctcattcagtatgaagaccgctggttctggaaacatcccggggtcaatcccttcgcggtactgcgcgccgcctggcaggatctcacttccgggcgggtggtttctggcggcagcacgctcaccatgcaggtggcgcgtctgctcgacccacatccgcgcaccttcggcggcaagctacgccagctatggcgggcgctgcagctggagtggcatctgtcaaaaaacgaaattcttaccctgtatctgaatcgcgcgccgtttggcggcaccctgcaggggatcggcgcggctagctgggcttatctcggtaaaccgcccgctcagctcagctacggcgaggcggcgctactggccgtgctgccgcaggcgccgagccgtttacgcccggaccgctggccgcagcgggcgcaggcggctcgcgataaggtgctggagaggatgctcagccagggcgtctggccgcggcgtgcggtacaggaagcgatcgaagagccggtgtggcttttcccgcggcagatgccgcagctggcgccgctgtttgcgcgccgggcgctggcgacaagcggtaatgaaaaggtgacgacaacgctcgatgccgggctccagcggcagcttgaagatctggcgatgaactggaaatcacgtctgccgccgcgcagctcactggcgattgtcgtcgtcgatcacactgatatgaaagtccgcggctgggtgggatcggcggatatccgcgacgatagtcgcttcggccacattgatatggtctcggcggtgcgctcgccggggtcggtgctgaaaccctttatctacgcgatggcgatggatgacgggctgattcacccggcatcgctattacaggatgtgccacggcgctttagcgattatcgcccaggtaatttcgacagcgggtttcatggcccggtgagcgccagcgaggctctggtgcgttcgttgaatctcccggcggtgcaggtgctcgaagcctatggaccaaaacgctttgcggctaatttacgcaatgccgggctccctctgatgttaccctccggcgccgaacctaatctgtcgctgatcctcggcggcgcaggggcgcgactggaagatattgtcgcggcgtacagcgctttcgcccgccatggcaaggcggcgcggctgcgcacgaaacccgacgacccgctggtagaacgagcgctaatgtcgccaggcgcggcatggatcacccggcggatattggcaggcgaagcccaaccgttacccgatgcgtcgctgccgcaagcggtgccgctggcgtggaaaaccggtaccagctacggttatcgcgatgcgtgggcggtaggcctcaacgcgcgttatttgattggcatctggaccggacggccagacggtacgccggtggtggggcagtttggttttgccagcgccgtgccgctgttaaaccaggtcaataatatgctgctggcgcgtccgttaatgagccgcggcgggctgccggtcgacccgcgtccgcagtcggtgagccgcggcactatctgctggcccggcgggcaggatctgccggttggcgatagcaactgccgccggcgcttagccagctggctgctggacgccagccagccgccgacgctgctgctaccgggccaggagggcgtgcgcggtatccgcttcccggtctggcgtaacgcaaaaggagaaagggtcgccgcggattgtccgggcgcgacagaaacttctgttgatgtctggccgctaccgctggaaccctggctgccggttagcgagcgccgccgggcgcggctgggtacggcatcgaaggcgtgtccgccgctgcaaactcaggatgccgcgccgctggtactttccggcatccgtgaaggcgcagtgataaaacgactgccgggcgaggcgcgggtgatgttacccgtgcaaacgagcggtgggaagggcgacgctggtggtttattaacggtgaaccattagaggcaacaggcgcaagaacgacaattacgctagataaacccggcgagtggcaactagtggtaatggatgaggcagggcaaacggcggccgccaatttcaccctacaataaacagggtaaatctgttgttggcggtttgtgttgctaatactcatcttattttaacaaaatgttaccttcgtccgtaggcatcgccgacgttgctcattataatgcgcgccaggccatacgatcgtatgtgcaacaacagaacatttaattagaggtaatcatggctattgaacgtactttttccatcatcaaaccaaacgcggtggcaaaaaacgttattggcagcatcttttctcgctttgaagctgcagggttcaaaatcgtcggcaccaaaatgctgcatctgaccgttgagcaggctcgcggtttctatgctgagcacgaaggtcgtccgttcttcgacggtctggttgaattcatgacctccggcccgatcgtggtttccgtactggaaggcgaaaacgcggttcagcgtcaccgtgacctgctgggcgccaccaacccggacaacgccctggccggtaccctgcgcgctgactacgctgacagcttcaccgagaacggcacccacggttccgactctgtagaatccgctgctcgcgaaatcgcgttcttctttgctgaaggcgaggtttgcccgcgcactcgctaatctcctgcgtctttcacgccacagctttgttggcttcattcgcgcaccccggtcacatagttatctatgctcccggggatttgcgaactcgccgcctcgctgtgacctgaaatactttggagatacgaccatcgtcttttcgatcgtcgcggcgtggcctgacaatcgaaaagccttagaggattaagtacgcagttacagatttttttatcattgctttgtgcaaacgtggcaatgatgcgccagaatttgtagaatatagcgcccccggacgagcagtcgctctccggggcgtttctttttcaacccacctggggccataacgtgtaataacgaggccggaaaaattatgtctgaacaaattgtcacacctgataccgccgctctgacggtgccgaataaagatgccaaaatcaacctgctggatttaaaccgtcagcagatgcgcgagtttttcaaaaacatgggcgagaagcctttccgcgccgatcaggtgatgaaatggatgtatcactactgctgcgatgactttgatgaaatgaccgacatcaacaaagtcctgcgcggtaaactgaaggaagtcgccgagatccgcgcgccggaagtcgttgaagagcagcgctccagcgacggcaccattaagtgggcgattgccgttggcgatcagcgcgttgaaacggtatatatcccggaagaagaccgcgccacgctgtgcgtctcttcacaggttggctgtgcgctggaatgtaaattctgctccaccgctcagcaaggcttcaaccgtaacctgcgcgtttccgaaattatcggccaggtctggcgcgcggcgaaaatcgtcggcgcggtgaagactaccggcgtacgtccaattaccaacgtggtaatgatgggaatgggcgagccgctgctgaacctcaacaacgtcgttccggcgatggaaatcatgctggatgacttcggttttggtctctccaaacgccgcgtgaccttgtctacctccggcgtggtgccggcgctggataaactcggcgatatgatcgacgttgcgttggcgatttctttgcacgcgccgaacgacaccatccgcgacgaaattgtaccgattaataaaaagtacaatattgagaccttcctgaactcggtgcgcggctatatttcgaagtccaacgccaatcagggcgtgtgactatcgagtacgtcatgctggatcacgtcaacgacggtaccgagcacgcccacgaactggcggcgctgctgaaagatacgccgtgcaagatcaacctgatcccatggaacccgttcccgggcgcgccgtatggccgtagttctaacagccgtatcgatcgtttctccaaagtgctgatggaatatggttttaccaccatcgtgcgtaaaacccgcggcgacgatatcgatgctgcctgcggccagctggcgggcgacgtaatcgaccgtaccaaacgtacgctgcgtaagcgtatgcagggcgaagcgatcgacgtgaaagccgtctgataagttatgcagcgcacagctttcgctgcgcgctgcataaatatgtcgaattgccaggcgaaatacgctgattcggttaataattacggtgcgtttttgtcgactttgaggcagtatgtagcggtacaacaaccgcttagcattcaatattgataagtctctgtgatagtcgcccggacagccttatactgtcggttgacgttgagcagtgtctcgcggcgcaggctctttcccgcgctgaactttaaatttcacgtaccagtagttgtagcgaatgaatactgaagccactcaagaccatcaagaagcaaactctacgggcgcgcgcctgcgtaacgcccgcgaacaactcggactcagccagcaagcggtggctgaacgcttatgcctgaaggtttccacggttcgtgatattgaagaagataaggcgccagccgatctcgcttcgaccttcctgcgtggctatatccgttcctacgctcgcctcgtacatattccggaagaagaactgctgccgatgatggcgaagcaagcgccgattcgcgccgccaaagtggcgccgatgcagagcttctcgctgggtaaacgtcgcaaaaaacgcgacggttggctgatgagctttacctggctgattttatttgtggttattggcctgagcggcgcatggtggtggcaagaccacaaagcgcagcaggaagagatcaccagcatggccgatcaatccaccagcgatctaaacagtagcgataacggcagccagtcgattccgctggacaccagctcggcgaataacgcgccagatgctacggcagccaattccaatagcgcgccggtcgatacctcaaacgcaccagcgccaagcgcaccagcagcgacctccgcaccggtggataacaacgccgtggttgctccttcgcaggctaacgtcgataccgccgccaccgcgccggctgcgccagccccgacctccgccttgcctaccgatcaggcgaatgccgcgacggcggcttccgctcaggatctggtgatgaactttaacgccgattgctggctggaagtgagcgatgcgaccggtaaaaaactgttcagcggcctgcagcgtaaaggcgggaacctgaacctgagcggtcaggcgccgtataagctgaaaatcggcgccccggctgcggtacaaatccagtatctgggcaaaccagtcgatttgagtcgttttatcagaactaaccaggttgcgcgtctgacccttaatgccgaacaatcaccggcgcagtaacagacgggtaacgcgggagatttttcatgcataaccaggctccaattcaacgtagaaagtccaaacgcatttacgttggtaatgtgccgattggcgatggggctcccatcgccgtacagtcgatgaccaatactcgcaccaccgatgtggccgcgacggtaaatcaaatcaaagcgctggagcgcgtgggcgcggacatcgtccgcgtttccgtcccgacgatggacgcagcggaagctttcaagctcatcaaacagcaggtcaacgtcccgctggtcgccgatatccactttgactaccgtattgcgctgaaagtcgcggaatatggcgttgattgcctgcgcatcaacccaggcaacattggtaacgaagagcgtatccgcatggttgtggactgcgcgcgcgacaaaaacattcctatccgcatcggcgtcaacgccggttcgctggaaaaagatctgcaggaaaaatacggcgagccgacgccgcaggcgctgttagagtccgccatgcgtcacgtcgatcatctcgatcgtttgaacttcgatcagttcaaagttagcgtaaaagcctcagatgtcttcctcgctgttgaatcctatcgtctgttggcgaagcagatcgatcaaccgctgcatctcgggatcaccgaagccggcggcgcgcgtagcggcgcggtaaaatccgcgatcggtttaggtctgctgctgtctgaagggatcggcgataccctgcgcgtgtcgctggccgccgacccggtggaagagatcaaagtcggcttcgatatcctgaagtcgctgcgcatccgttctcgcggtattaactttatcgcttgcccgacctgctcgcgtcaggagtttgacgtcatcggtacggtgaatgcgctggagcaacgtctggaagatatcatcactccgatggatgtttcgatcatcggctgcgtggttaacggcccaggcgaagcgctggtttccactctcggcgtcaccggcggcaacaagaaaagcggcctttacgaagacggcgtgcgcaaagaccgactggacaacaacgatatgatcgaccagctggaagcgcgtatccgcgcgaaagccaccatgctggatgaagcgcgtcgtattgaagttcagcaggttgaagcaaaataacgtgttgggaagcgatacgcttcccgtgtatgattgaacctgcgggcgcaaggcgccggggttcatttttatatataaagagaataaacgtggcaaagaacattcaagccatccgtggcatgaacgattatctgccgggcgaaaccgctctctggcagcgcattgaaggctcactgaagcaggtgctcggtagctacggttacagcgaaattcgtttgccgattgtagagcagaccccgttattcaaacgcgcgatcggcgaagtgaccgacgtggttgaaaaagagatgtataccttcgaagaccgcaatggcgatagcctgacgctgcgtccggaaggaacggcgggctgcgtacgtgccggcatcgaacatggtctgctgtacaatcaagaacagcgtctgtggtacgtggggccgatgttccgccacgagcgtccgcagaaagggcgctaccgtcagttccatcagattggcgcggaagtctttggcctgcagggcccggatatcgacgctgagcttatcatgttgaccgcgcgctggtggcgcgagctgggcatttccgatcatgtcagccttgagctgaactccatcggttcgctggaggcgcgtgccgcctatcgcgacgcgctggttgcctatctggaacaattcaaagataagcttgatgaagactgcaaacgccgcatgtataccaacccgctgcgcgtgctggattctaaaaatccggaagtacaggcgctgctgaacgatgcgccggcgctgggcgattatctggacgacgagtccaaagaacacttcgccggtctgtgcgcgctgctcgacgcggccggaattcgctataccgtcaaccagcgtctggtacgcgggctcgactattacaatcgcaccgtatttgagtgggtcactaccagcctcggttcgcagggcaccgtatgcgccggcggccgttacgacggtctggttgagcagcttggcggacgcgcgacgccgggcgttggctttgcgatgggcctggaacgtcttgttttactggttcaggcagtcaatccggaatttaaagccgatcctgttgtcgatatatacctggtagcctccggtaccgatactcagtccgcagcaatgcgtctggctgagcaggttcgcgatgcgctgcccggcgttaagctgatgactaaccacggtggcggtaactttaagaagcagttcgcccgcgctgacaagtggggcgcgcgcgtcgcgctggtggtcggtgagtcagaaattgctgacggaaacgtggtagtgaaggatttacgctcaggtgagcaaactaccgtaacgcaggatagcgttgccgcgcatttgcgcacacttctgggttaatttcccggaaactattagtcaggagaaggactgcgtggaaactttcaacaacgaaaacgagcaggtcgacgccctcaagcgtttctttgccgagaacggtaaagcgctggccgtcggggtgattttagggatcggcgcgctggttggctggcgctactggacttcccatcagctggattcggcccgggattcctctctggcctatgagaatgccatttccgcgctgaagtcaggttcgcctgaaaccttgaccgcagcggagaaattcgccgccgacagcaaaaacacctatggcgcgttcgcatcgctggagctcgcgcagcgtctggtcgataaaaacgatctgcagggcgcggagaagcagctgcaacaagggctggcggccgcctctgacgataacctgaaatcggttatcaatatgcgtctggcccgcgtacagctgcagcttaagcagccggatgcggcgctgaaaaccctggaaggcattaaaggcgaaggctggaccgctatcgttgccgatttgcgcggtgaaattctgctgagcaaaggcgacaagcagggtgcccgcgcggcctgggaatcaggcgtgaaaagcgatgcatcgccagcgctcagcgaaatgatgcgtatgaaaataaataatttgtccatctgagagggactcgatgcaattgcgtaaattacttttgccagggctgctttccgtcaccttactgagcggttgctcgctgtttaacagcgaagaagatgtggtgaaaatgtcaccgctgccgacggtggaaaaccagtttacgccgtccacgtcctggagcacttcagttggcgatggtatcggtgatttctattccaacctgcacccggcctttgccgacggcgttgtgtatgcggctgaccgtaaaggcaccgtgaaagcactgcacgctgaagacggtaaagaagtctggtcggtgaacctggcggaaaaagacggctggttctcgcgcgccccggcgctgctctccggcgggctgaccgtttccggcggccacgtttatgttggtactgaaaaggcgcagctgttcgcgctgaataccagcgacggcaccgtcgcgtggcagagccgtgtggcgggtgaagcgatttctcgtccggtcgttagcgatggcatggtactggtgcataccagcaacggtcagctgcaggcgctgaacgaaaccgacggcgcggtgaaatggaccgtgaacctggacatgcctgcgctctccctgcgcggtgaatccgctccggccactgcctatggcgcggcgattgtcggcggtgacaacggtcgcgtcagcgccgtgctgatgcagcaggggcagatgatttggcagcagcgtatttctacggccaccggcccgactgaaatcgaccgtctgaatgacgttgacaccactccggttatcgttaatggcgttgtttatacgttggcttataatggcaacctgaccgcactggacctgcgtagcggccagattatctggaaacgcgaactgggttctgtgaacgatttcatcgttgacggcgaccgtatctatctggtcgatcagaatgaccgtctgctggcgctgaccaccgatggcggcgtaacgctgtggacccagagcgatctgcttcaccgtctgctgacctctccggcgctgtataacggcagcctggtggtaggcgatagcgaaggttacatgcactggattaatccggaagacggccactttgtggcgcagcagaaagtcgatagctccggtttcctgaccgacccggttatcgccgacggtcgcctgcttatccaggccaaagacggtacgctgtattcgatcacgcgttaactcgcgcggtagtatcgctttaataaacggctcctgacagacaggggccgttttgactttttaaaaaacctcgtaaaatgaggttgtattgcaatttgtatgaggcatttaacatgatacctgtggtcgcgcttgtcgggcgccctaacgttggaaaatccacgctcttcaaccgcttaacgcgcactcgtgacgcgttggtcgcggatttcccggggctgactcgcgaccgtaagtacggtcgtgctgaagtggaaggccgcgaattcatctgtatcgataccggtggtatcgacggtaccgaagaaggcgtggaaacccggatggcggaacagtctctgctggcgattgaagaggccgacgtggtgctgtttatggttgatgcgcgcgcgggcctgatgccggcggattccgcgatcgccaaacatctgcgttctcgcgaaaaaccgaccttcctggtggcgaacaaaaccgacggcatcgacgtcgatcaggcgatggccgacttctggtcgctggggttgggcgatatttatccgatcgccgcttcgcacggtcgcggcgttaccagcctgctggaacacgtgctgctgccgtgggtagatgaggttaatccacaggaagaagtggatgaagacgccgcctactgggcgcagtttgaagccgagcaaaacggcgaagaagttgaagaaccggaagacgacttcaacccgcaagatctcccgattaagctggcgatcgtcggccgcccgaacgtcggtaagtcaacgctgactaaccgcattctcggcgaagaccgtgtggtggtctacgatatgccgggcactacccgcgacagcatctacattccgatgcagcgcgatgaacgcgaatacgtgcttatcgataccgccggcgtgcgtaagcgcggcaaaattaccgatgtcgtggagaaattctcggtcatcaagacgctgcaggcgattgaagacgccaacgtggtgatgctggtcattgatgcccgtgaaggtatctccgatcaggatctgtcgctgctgggctttatccttaatagcggtcgttccctggttatcgtggtcaacaaatgggatggcctgagccaggaagtgagagagcaggtgaaagaaaccctggacttccgtctgggcttcattgatttcgcccgcgtgcactttatctccgctctgcacggcagcggcgttggcaacctgtttgaatcggtgcgcgaagcttacgacagcgccacccgtcgcgtgggtaccgccatgctgacccgcattatgaccatggcggcagaagaccatcagccgccgctggtacgcggtcgccgcgtgaagctgaagtatgctcacgccggcggttataacccgccgattgtggtgattcacggcaaccaggtgaaagacctgccggattcctacaagcgttacctgatgaactacttccgtaaatccttggatgtcatgggtacgccgatccgtattcagttcaaggaaggggaaaacccgtttgccaataaacgcaataccctgacgccgaaccagatgcgtaagcgtaagcgcttgattaagcatatcaagaaaagcaaataatgcaggaacccgccgctggcgggtttttttatctaccacattcaacgcgttgccgggtcagcaacgctgaagtatgacgtgataaactcatgctattcatgacaagaaggagacaccatggaactcaattgccccatttgccatgcccggttggaaacgcaaggcaacggcgcgcattgcgcgcactgtgaaaaagattttgttttagaggcccgctgcccggactgccatcagccgctggaagtgttgaaggcctgcggcgcggtggattatttctgccagcacggccacgggctgatttcgaaaaaacgcgtcgaatttgtgctcggttaatcgctaacgcagccttcaccgttacgccagagttcaaccagcgcctgcggcgctcgctcttccgggatgagaatgatcaggctgtgatagtgccgggcgctgattatttggatgcgaaagaaccgctggtcgccgctacccggagaatccggctgccccggcggcttgccgagcggcaacgactgctgcagtattgcggcgatgcgctgtttttgttgctcgttaagctgcgctacgacaatcttacgcatgccgctcagcgtcgggatccaggcgacgccaccttcgcgggccagctcaataatcgcgtcatcgctgagatcgtcctcgttcatgatgtgactccaacatcctcccaggcctttcgaatcgcctcggcggtctctttaccaaaacgtttttcgccatgatgaatcgtcagtttggcaaaggccgggaaatcggcgtcttttgccagtgacttatcacaaaccgcgtcgtaccaggcatatcccgctttttcccatgcaaaaccacccagtgcgatggcagcgagatagaaagcatgattaggaatgccggagttaatatgcacgccgccgttatcctgttgggtatgcacaaaatctttcatatgggcgggttgtgggtctttgccaagaatagggtcatcataggcggttcccgggtgcgacatcgaacgcagaccttggccgtgaatacctttagcgagtagcccctcgccaattatccagtctgctttatctgccgtttgctggcgctgatattgtttgaccagcgagccaaaaacatcggaaagcgattcattgagcgccccggattgttcgaaatagataagcccggcttcgctctccgtaacgccatggcttaattcgtgcgccaccacatcaatcgcaatagtaaaacgattaaagatctcgccatcaccgtcgccaaacaccatttgttgaccgttccagaaggcattttgatattcgtgaccatagtggacgctgccggtcagcttcaatccgcggttgtccagcgaatcacgatgatagctcttccaaaaaaaatcgtgggtgatgccgagatagtcgtaggcctcatcgacggcgacatccccgttggaaggttgtccttcaaagcgcacctggagccctggaagttcctgagtctgcctggcatcgtaaatgtcgcgctcaagctggcctggcgtggcgacatgggcggcagctgggcggcccggcacgtgtgccatcagggtttgtacatggctcagcgtttgctgcgcgcagcgttgttgctgagcggaaccatgatcgacaatgcggcgtaaaatgtagggtggaataacgaaacgaggacaagtatctggcatatcacgctccctggccggatgaacggttttaaaagggcatgacagcagtatagttatccccgcatgaaacgggaggataatcagacttttttgcgggcgcgcgttttcttcaccggagtgatggctgtcacttcgcttttaacccaaccatcttccagccgggtagtcacgacatcgccagcctgcacctgtttgattttttttaatactttgccgtcaccggctgaggtgacgctatagccacgagccagcgtcgccagcgggctgacggcttccagatgcgtcacggtattgccaaagcgctcacgctgctcgctcagacgggcgcgaatattttccgccagacggtattccagttgctgaatacgcgactgcgcgcgatggatgcgcgtctgcgggttttgctgattcaaccgctgcacggcgcgctgctgacgctggtcggcgcgtttgatctggctttccagcgcaaagcgcatccgctgacgcaggcgttccagttcagtttgctgacgcgctaagcgcagctgaggatgttgctgctgtaaacggtgaaacaactgcgtaaagcggcgatggcggttggcgaggaagtaatccatcgccatctcaaggcgctgctggcctgactgtaactgacgcaacagttcctgctgattgcggctgacgatctctgccgccgcagagggtgtcggagcacgcaggtcggcgacgaaatcggcgatagtgacgtcagtttcatggccgacggcgctcactaccggaatgcggctggcgaaaattgcccgcgcgacccgttcgtcgttaaagctccacaaatcttccagcgaaccgccaccgcgcccgacgatcagcacatcgcactcctggcgctggttggctaatgctattgcgcgcacgatttgccccggcgcatcatcgccttgcaccgccgtcgggtagataatcaccggcagcgagggatcgcggcgtttcaacacatgtaaaatatcatgcagcgcggcgccggttttggaggtgataacgccgacgcagtgcgcggggaggggagcgcctgcttgtggctttgatcgaataacccttccgccgccaggagcgccttgagctgctcatatttttgctgcaacagaccttcaccggcgggctgcatgctttcgacgatgatctggtagtcgccgcgcggctcgtaaagcgtaatgttggcgcgcaccagcacctgctggccatgctgcgggcgaaacgtgacgcgacggttgctgttgcgaaacatcgcgcagcgcacctgggcgttatcgtcttttaaggtgaagtaccagtgaccggaagagggctggctgaagttagagatctcgccgcttatccagacctggcccatttcgcgttctagcagtaagcgaaccgtctgattcaggcggctgaccgtaaatattgcaggggattgagatggcaacatgtgagcaagatcaaattctaaatcagcaggttattcagtcgatagtaacgcgctgagagggatcgcaagtattatttgcaaaaaagggtggatgcaatcggttacgctctgtataatgccacggcaatatttatccaccctggtcgagatattgcccatgctacgtatcgctaaagaagccctgacgtttgacgacgtcctccttgttcccgctcattctaccgttctgccgaataccgccgatctcagcacgcagctgacgaaaactattcgtctgaatattcctatgctctccgcggcgatggataccgtaactgaagcgcgcctggcgattgccctggcccaggaaggcggcatcggctttattcataaaaacatgtcaatcgagcgccaggctgaagaagtccgtcgcgtgaagaaacatgaatccggcgtggtaagcgatccacagactgtactgccgaccaccaccctgcgcgaagtaaaagaactgactgaacgtaacggtttcgccggttatccggtagtgaccgaggacaacgaactggtcggcattatcaccggccgcgacgtgcgttttgttaccgatctgaatcagccggtcagcgtttatatgacgccgaaagagcgcctggtcaccgtgcgtgaaggcgagagccgtgaagtggtcttcgctaaaatgcacgaaaaacgcgtagaaaaagcgctggtggtggatgatagcttccacctgcgcggcatgatcaccgtaaaagatttccagaaagcggaacgtaaaccgaatgcatgtaaagacgagcacggtcgtctgcgcgttggcgcggccgttggcgccggcgccggtaacgaagagcgcgttgacgcgctggttgccgcaggcgttgacgttctgctgatcgattcctctcacggtcactccgaaggcgttctgcagcgtattcgcgaaacgcgcgctaaatatcctgacctgcaaatcatcggcggcaacgtggcgaccggcgcgggtgctcgtgccctggcggaagctggcgtcagcgcggtgaaagtgggtatcggccctggctccatttgtactacccgtatcgttaccggcgtaggcgttccgcagatcaccgccgtttccgacgcggttgaagcgctggaaggcaccggtattccggttatcgccgatggcggtatccgtttctccggcgatatcgcaaaagcgattgccgcaggcgccgccgcggtgatggttggctccatgctggccggtaccgaagaatccccgggtgaaatcgagctctatcagggccgttcttacaaatcctaccgcggtatgggttccctgggcgcgatgtccaaaggttcctccgaccgttacttccagagcgataacgccgctgacaaactggtaccggaaggtatcgaaggccgcgttgcctataaaggccgcctgaaagagatcattcaccagcagatgggcggcctgcgctcctgtatgggtctgaccggttgtggtactattgacgcactgcgtaccaaagcagagttcgtgcgcatcagcggcgcgggcatccaggagagccacgttcacgacgtgacgatcaccaaggaatccccgaactaccgcatgggctcctgattttcatcgcccggctacgcgccgggcgatttttattcaatcatcgctacttctctggaattaacgtcaatgacggataacattcataaacatcgcattcttatcctggacttcggttctcagtacacccagctggttgcgcgtcgcgtacgtgaattaggggtctattgcgagctctgggcttgggacgtgaccgaagctcaaatccgcgagttcaacccgaacggcattattctttccggcggcccggaaagcaccaccgaagacaacagcccgcgcgcgccgcagtacgtcttcgaagccggcgtaccggtattcggcgtatgctatggcatgcagaccatggccatgcagctgggcggccacgttgaagcttccaacgagcgcgagtttggttacgcgcaggtggaagtgcagaccgacagcgcgctgatcaagggcatcgaagatgcgctgagcgctgacggtaaaccgctactggacgtgtggatgagccatggtgataaagtcaccgctatcccttccgactttgtgaccgtcgccagcactgaaagctgcccgttcgccatcatggcgaatgaagaaaaacgcttctacggcgtacagttccaccctgaagtcacccacacgcgtcaggggctgcgtatgctggagcgctttgtgcgcgatatctgccagtgtgaagcgctgtggacgccggcgaagatcatcgacgacgcggttgagcgtattcgtcagcaggtgggtgaagataaagtcatcctcggcctgtccggcggcgttgactcttccgttaccgcgatgctgctgcaccgcgccatcggcaaaaacctgacctgcgtattcgtggataacggcctgctgcgcctgaacgaagccgagcaggttatggatatgttcggcgaccgtttcggcctgaacatcgtgcacgttgcggcggaagatcgcttcctgaccgcgctgaagggcgaaaacgatccggaagcgaagcgtaaaatcattggccgcgtcttcgttgaagtgtttgacgaagaagcgctgaagctggaagacgtgaaatggctggcgcagggcactatctaccctgacgtgatcgaatccgccgcttccgcgaccggtaaagcgcacgtcatcaagtctcaccacaacgtgggcggcctgccgaaagagatgaagatgggcctcgttgaaccgctgaaagagctgttcaaagacgaagtgcgtaagattggcctggagctgggcctgccgtacgacatgctgttccgccacccgttcccgggccgggccttggcgttcgcgtactcggcgaagtgaagaaagagtactgcgacctgctgcgtcgcgcggacgctatcttcattgaagaactgcgcaaagccgacctgtatgacaaagtaagccaggcatttaccgtgttcctgccggttcgctccgtcggcgtgatgggcgatggccgtaaatacgactgggtcgtctccctgcgtgcggtagaaaccatcgactttatgaccgcgcactgggcgcacctgccgtatgatttcctcggccgtgtttccaaccgcatcatcaacgaagttaacggtatttcccgcgtggtgtacgacatcagcggcaagccgccagcgactattgagtgggaatgattcctgctgatagctgaaccaaaccctctgttttacagagggtttttcataccctctcttcactttgtccctgacttatccgcacaacctgccgccgctgcagccagccgattctcagtgccagccccagtacgaccagcgataatagacccgaaatagcaaggctcctttctatccccagatgttgatttagccaggcataggcaaatggcgagacggcggccagtagttgcgctgggatcaacagacatccggtacgccgcgcgtaatcttccgccgcgaatagctgcaacggtaatgtcgctttaaataccgtcgtcaggccgttaatggccccgtaggcgaaaacgaaaccgccaacggtccagcttagcgaggcggcgttgaggcccagtaaaaagcagagcggcaacagcgctgtggtcaacagcgttaaccgaagtggggagaggcgcgcacctgaaatcacctccagaaatcgggcgccggtctgtccgatgccccatagtacccctatcattaccggcagaccgtagctggcgataaactcaggcagatgggtggatgtgccgttagaaataaaggtgaccaaagcgataagcgaggcgtacagcagtcctatgtgctggttgcgacgggaaagcggcactttctcctgatgagcgctccggtcgggcaagcattgattaggcatccgccacagcagtagtgcgctaagcaggccaaacaggctgtagattaccagcgctccgcgccatcccattagcgcgagcagcgcggtgcccagcggccagaatatcgctgaggccaatcctccagccagggtcacccgtgaaatagttactctggcgcgttgaccgtacaggttaaccagcgcggcgaacagcgcatcgtatagcgccagccgcataccgacaccggccagtagccatgcgacataccagaagatcaggctgtctgcctgcgacattgccaggcagcttgccgcgatggttaatgaaccgatgaacaccacccgctgaccgccaaaccaggccaacaggcgggcgataaaaggcgagatcgccgccatcatcagcatggcgaaagtcaaaccgagatagatctctgttccgccccagccagtatcattagcaatagcgccggcaaaggtaccgggcatataaaaaacgatcccccaattgatgagctggttgccgccggctgcgagggtaagggaaagaggcgcggtgccagacaaggttgacgttttcattgaattccaaagcgttatgcagttgtcggcagcatatcgcgcgcgctattgtgcaggcagtccctggggcttatagcctgcataagagaaactttgtgatgacgatgctgaatttggtaaacctgacaaccttccggctggtggcgcagcgcggcagtttttccgccgccgctgatgtactgggaatatcgcagccggcagtaagcctgcaggttcgccagcttgagcagttcctgcagacgcggttggttgagcgtaccgggcgagggatcaaggctactgccgccggattggcgctaatggcccatagtgaaattattgagcaggcggtgaatacggcggtgcagacggtgactgagtttaaccatgaagtgcacggcacgatgagcttcggtaccggggcgacggcctgtattcatttgctgccgccgttattgcgccatctacgcgagaagcatccgctgttaacggttggcgtcacgaccggtaataccctggacgttgtacgtgcggtggaagagagccggcttgatctgggattggtgaccttacctgccagcggccgcagcctggcggtaacgccagtgctggaggaagagtttgtatttattactgccaatgatgatgaaccgctaatggggcaactgacgccttcactgctacaggctctttcgctaatagcatttgaagccggcagcgggacccgtgagctaatcgatggctggtttcgcgctgccgggttaaacacggcgccggtgatgcaactcggtagcattgaggctatcaagcgtatggtgcgagccggtctgggatacagtatcgtaccgaagatggcggtggcggctgaagatgaccgcaccggaatacgtgtacagtcgctatcgccgcggctctatcgccaactgggcgtggtgatgcgtcaggataaagttatcaacaaggggatcgcggagatgctgcgtctgctgcaccaactaaaaattttgccgtagacgttattcctggactggggtcgttggcgtcgtgggagcgtcaatggtgatggtcgattgctgcgactcttgtttgtcctgatgatggtaccaggcaccgatagaggagtagacaaagcgtccaaagaagaagagaaaactgataagtagtacgatacgggtcatgcgacggttaaatcgatgtcgtttacgcatactgggtgcctgactcacaaaaggttccttgaagtatacccgaagacgggcgatgggggtattaagtcatagtatagcggcggggtcaattgtcggcggtgtaaaaatcgtagtgctaaaacattactagatgttatataaaatgaacatcgtatttacacggattttagttattgcaccaggccgcaaaaaaataagctttattaatattagcaaaagattttattgatttacgtcaattgcttgattccattggtcactaaaatcgtccatctgttccgcatcgttattactttcgcggttagcctggtcgggttggatgcctgtctgaatatactccgcaggagttggggtaatctgtcgagcatctatgagtattattaaactatacaaacgatatcaggataaatggtgggcgctaccgctcattctgcctacgttgctgttgccgctggcgcgtgccgcgaatacattcgcaaatcttaacggtcataccgtctttctgttttatcttccgctggcgttaatattgagcctgatgctgtttttcggctgggcggcgattccgggcattatagtcggcttgctgctgaccattacgcgcggaatgaccttcgagcaatctatcggggtattgtttcattttttgatcccctcagtgctgtgctggggcggttatcgtattttcgttccgcgacgccagcagatttcacatggtaatgttgccctgatgccgcatcggctgttctggcagatgctgctgccctcggtaatatttctcattatttcgcagattgctgagtatcttggcctgcatccgcgggctgcggaactggtaggggcaacgccatttagtttacgttcgttaatcacttttcaggcgctgatggtggggtgtttaaccggtgtgccgctgtgttattttttgctgcgtgttattcgtaatccattacacttacgcggttttatatcccaggtgcgtttgcaaatcgaccaaaaaataaaaccactggaaattattgtctgggcaatagtattgttaataatactagttttattattcatgccgttaaatgcgaatagcacgatatttagcacaaattatacactttcattacttatgccggtcatgttgtggggagcaatgcgttttggctatcgttttatttccctggtgtggccgccgatattaattctggttatccattttcattacagttatctgccatttaccccgatctacaataaccagctggcgattacctcctccagttatctggtgttctcttttattatcgcttatatggcaatgctggcgacgcaacagcggatgatccaccgtcgggttcgccgaatggcctttctcgatccggtcgttcatatgccgaatttgcgcgccttgagccgagcgctaagccactcgacctggtcggtactgtgctttttacgcatgccagagctggagttgcttgggaggcactatggcgtgatgctgcgaattcagtataagcagcagctgtcggaatacctgagtcacatactgcagtcgaacgaaatggtctatcacctttcgggccatgaccttgtgatacgcctgaatagcgacgatcatcaaaaacgcatcgtgatgctggatgagcggattaagcagttccgttttatctgggatggtattccgctgcaaccgcctgtcgggatcagctattgcaacgtacgttctcctgttaagcatctgtatttactgcttggcgaactgaataatattgccgatatgtcattgaccagcggccacccggaaaacgtgcagcgccgtggcgccgttcacgttcagcaggggctaaaagaacgcgtgtcaatgatgaaccagatcctacaagcgctggatcagaatcgttttcggctgatggcgcagccaattattggcatgcgtggcgacagctatcatgaagtcctgttgcgtatggtgggcgagcagggcgagctggttgcgccggataattttttgcccgcggcgcacgaatttggcctggcttcgcgtatcgacaactgggttatcgacaatacgctggcttttatgaacgataatcgccatacgttgccgggcatgcgtctggccatcaatctgtcgccagtttcggtcagccgcagccatttcccggacgaagtcgaggaaatgctgcatcattataatattgagccctggcagattatttttgaactgactgaaaatcactcgcttagtaatccagaacaggcgcaacaaaccctcgcgcgtttgcaggaattgggatgccgggtggcgattgatgattttggtaccggctacgccagctatgcgcggttgaaaacgcttaacgtggacatgctgaaaattgacggtagctttatccgtaatctggtcaccagtagtctggattatcaggttgtggcatcaatttgccggttggcgcaaatcaaaaatatgcaggtagtggcggagtatgtggaatcaccggagatccgccgggcggtgatttcactgggtattgattacatgcagggctatgacattggtttgccagttccgatagaacagctggcctgcgcggctgacgtcgcataaaaaacggccgggcgtgtggcccggccgttttagtgaaagatgccagctttatgcctcttcctcagtaattttcagcagccattccggcacgccttcccagtactgttgctctttttccagatccagcagcaccaacgcgttctggctaaaccagtcatgagggaaaattaacgtccagtggttggcttccgtcttcaatgtcagttttggcggcgtagtcgtcgcctgacgttgattgttcagtaatacgcccaggcgcagcagttggatcagcggcaggaactgttttttcttgaacaaggtaaaacgtggcaaatcatcaagcttgatagccttgcggtgatagcgcaccagcgtggccatcagtatctgctgctcctggttaaagccaggcagatcgctattttgcaggatataggcggagtggcgatgcatgccgctgtggttaatgttcagccccacttcatgtagcattaccgcccacttcagcagagcagacagatgcggattcgccagtttcgggttttgttcctgccactgttccagcatctgcgtggtggtctccagtacccgtcgcgcctgctcgcgatcgatattgtactggttcgccaggctttgggctgtacggctgcgaatatcctggtggcggaagcgaccttccatctcgtacaacacaccttcgcgcagagcgccgtcggacagacgcagctctttgatcgccagcgcgtcgaataccccgcacaaaatcgccagacccgggcgaataccgctttacggtcttccgacaatcccggcaggcttaatgaatcgaagtttttattcttcagcagctcactaaccagcatttccaggcgatcaggcgtaataaatccgtctttttcccccatggcgatcagcacttcatgcgctgctttgatggtgccagaggcgcccagcgccacgttccatccctgaatacgaaactgccatgccagcgtttccagcttctgcaccgccgccaggcgcgcgcgctggaagttttctttattgataacgccgccggggaaataggcctgcgagaagcttacgcagcccatgcgtcggctttccaccaggcggggctcgaaatcttcgccgatcacgagctcagtcgaaccgccgccgatgtcgataaccagtttacggccacgctccggctgagtatgctcaacccccataaaaatcagacgcgcttcttcgttaccggagattatctcgatggggtaagggatgactttttccgctcgtttgagaaaatccgccgcgttagccgcctggcgcagggtatgcgtcccgacgatacaaacgctggaaggggagaacccctgcagacgttcagcaaacagcgacaggcagttcagcccacgtgtaatcgcttcttcgctcaacaccgagttttcatccagcccatcggccaggtgtacgcgctgcttcaggcgaccgatgatctgcattgccccgtcgacgacacgggcgatcaccatatgaaaactgttcgaaccaaggtcgaccgcagcgaactcctgcggtcgaggggttttttcgtttattggcataggttaatcgggttgttcgagtgatttgagataatcgtaaatcgctatctgtgcgcgtactttgcggcgattgccgcgcggcacgtagcgattactcagttctttatcaagatagcgcgcttttacggtatcgttgaacaggatatcgagaatatccagtacgcgttgcttcagacgcgggtccagcagcggtacggcgacttcgatacgatagtcgatattgcgtgtcatccagtcggcggaagataaccacacctgtttatcaccgccgttttcaaaacaatagaccctatcgtgctcaaggaaacggtcaacgatactaatcacgcgaatattttcgctaattccctcaagacccgggattagcgagcacatgccgcggataagcaggttaaccggcacgccggtactggaggcggcatagagtctgtccaccagccctttatcgaccaggttatttaatttaagcgtaattccggacggttgcccattttgcgcattggcgatttcgcggtcgatcatttcatacagcagacgacgcgagttctgcggcgataccaacaggtagtcgaagctgactggccggtaagggttttcgataaaattaaacacgcgacggacttcattagtgatgcgcgcgtcggcggtgaggagcgaatagtcggtgtagatacgagcggttttctcgttgaagttgccggtgccgatatgcgcataacgcactacctcatcgccttctttacgcgaaatgaggaagagtttggcgtggatcttcagccccggcgccgagaagataacgtgtacgccggcttctgtcagacgtttggcccagtgaatattggcctcttcgtcgaagcgagcctgcagttcaaccaccacggtcacttttttaccgttgtgggcggcgtggatcatcgaatcgataatccgtgaatccttagcgacgcggtagatattgattttgattgccagcacgcttgggtcgaacgaggcctgacgcagcagttcaagcacgtgctcgaaggtatgatacggatagtagagcagtacgtcgcgttcgcggatggcgtcaaagccgttgcggaatttatcgaaccacaggtgacgcaggcgcggcatcggtttgttgaccagattggccttgccaacattcgggaaaccgataaagtctttaaagttatgataacgaccgcccggcagcatcgaatcgtagttcgagatggagagcttatcgcgcagcatttcgaccatcgcatccggcatatcgcgctggtagacaaaacgcaccggctcggcggttaagcgctgcttcaggctggaggacatcagctccatcaggctcgattccatttcgtgtaccagatcgtactcggcatcacgggtcattttcatcgagtatgcattcagggcatcgtagtcaaagaagcccttaaagatatcatccaggcagtaacgcagaatgttatccagcagaatcatcggtttgcggcgtcgcggcgtctccggcggcaggttcacaaagcgcggtaccttatcagacggaatctccagcagcgcataattaatggtgtcgccgcgaataatctccaccgccagataggtgtaatcatctttcaggaattgaaccagatccgtctcgcggttgatcagaatcggcgaaatatgctggcgaagatactgtttgaagtagttgcgcagccaggactgctggttaacggacagctggcgttcgttaatcaggaagatctgattacgcgccatttccagcagcagttcattatagagaccatcaaattcctgatcggccttcagtacgcgagcctggattttgcctaacagatgacgtgaatgggcggtactgccttgttcttcactgataagaatacgccgcttaagttcggcgaagcgcactttgtaaaactcatcaaggttgttggagtaaatccctaagaagcgcatgcgctcgatgagcggattgctcttgtccgccgcttcctgaagtacgcgctcgttaaaggacaaccagctgagttctttttcgatgtatagcttttcctggcccattacaactcacactccggatcattgacgtcgctttttcattatggcgagctttgccattgaatgtccaactatgtcaaagcaatatgacagttttcttgcaatcagatgccgggaaaaagcggacgcgtttgtttgcttacgttatgttcagtcaggggcgaaatggagggcgaaacaatgtgggaaacgcgggcgctggagctcaataatcaggacatctggcactggccgtcggcctgtcggttgattgaatacgcaattgagcatgattttaataccgtggtggtggggcagaccgagttatttggcaagctggtttcgccacaggggtatacgccttttgactacaacgaccgattgtcgagccaacaacgagcgcgctgtatctatctcaaccggctggcgttacgctgccgtgagcaggggttgcgatgttatctgcaggcgaaagaacttagcttcccgaccgaactgttattagcgcatccggaactgctggataccccgcgcggggtgcgttttgatgtcgatttctggagccgctggttaaccgacaaaatccgcgccgtgtgtcaaagcgtaccggcgctcaccggtttgattatcgcgctctccagtactgatggattattaccgatctctcgtccgcagtgggacagacaacacgacgatcccgccagccagcgcaaagcttgatgctctaccgccgctgttttaacgccctgagtcaggcggtagccgcgcaaaataagcatctggtactgcgtgtcttccctgccagcaatgacgatctcagcgccgtgctggatgcgattgaaccgctgccgcctgcggtttcggtatcgataaaactcacgccggaacgtttctggcctgctttccctaacaatccggcgctgttggcggtgcagacgcgagatgtatggatcgatatcgatcttgccggcgaagaagtgggatggggagtcatgccgtttttacgtattgatgagctgcaggggcgactgttgtggtgtcagagtcgcaacccgcgcattaccggcgctatctgtaaaaccagttgggaaagtatcgataatcactggatccctgcgacgttaagcgaatgtaatctcttcgcctgtagtcagttgctgggcgaaggggcggcgaaaaatcagcagcagttactggtgcaatggctggcgcagcgttacggctggtgtccgccagccgatgtcgcgcagcagttccagtcgctgcttgagcaggcgacgcagacgctctatcagtcaatatatgtgcgagaccatgttttccatcgccatagccaattgcctgaaagctacggccaggcggtgtggggcctttacggacaactggcgcgcagtcactggttacccggttcggcgcaggatatccacttcacccgcgacgacccgcagaagtcgatggctaatctcacgcaaatcgcgcaagaaaaagatgaggtcgcagccagcgcgcagctgctggggaaagcagcgcaagcgttcgctctcacggcggattttcccgccgcgctggcgcttcggtggcgtgaggagtggcagggactggcgctctattgccagacgtttacccacgcgcaaaaggccttctttactctgcacttcgcccgagaggtggaaaacagctggagcatgcgggagatttgccatattaacgtgcaggcgttatatcgctgcgcatcggaaatggaaacgctttgtcagcagacaggcgaggcctcaccggcgttttacgtgatgttcgatcctgtacgagcacgtagcctggcggatagtctgagcaccgaactgacggcgctcagatagctgtattaaagcgtgcggcgtagcgcttcaaccaggcacagtatcgccattgcctggccgtagggcatggcggtcaggggatgttacgatagtggtcgaggtcgttgcccatcgccgtgccaaacgacacctgcgttaactctccttgcggcgagatatgttcgataatgccccggcaggccttcacggcgaccggcagaaacgcgtcgtcaaggtaaccgaggcgtaccgccttgaaaatgcccgcggcaaaccctgccgtcgcagaggcttccagataactgtccgggtcgttaagcagcgttggccataggccgttttcggcctggcagcgggcaagggcgctgacctgaatctgcagcgtattttgcagttggcggtaaaaggcgtcatgctcgtcgagatcgaggatctccagtagttccggtatcgccagcgttatccagctattgccgcgagcccacagcgcgccggcgaaatggtgtctgccgtcgaaatgccagccgtgaaaccagaggccgctttggtggtcgcttaaatagtgcaggtgctgcaaaaactgaaatttcgcctcttctacccagcgaggtttaccaaacattttgccgagcatcgccagcggcagtaccgccatcattagcgtatcatcccagatttgttgatgatggggattctcataggtgacgtgttgcaggcagtcctcctcggtacgtggcatctggcgatatatagcgtctccccagctttccagataggcgcgccagtcgctgcgaggcgtctgttgatagcgcagcgccagggttaaaaacggacaagcggtattgatgtttttctccggcgtgccctcggcgaaacgggcgctaaaccagccgtcgataagttcacgagcctgaagcgatcctgtcagttgctggtagcgaaagaggccaaacagggcgatgccatgcgtccactcccagccgtcccaacctttggtgtcaaccacccggccatctgccagccgctgcaaatactcaccgctatcgtcggtaatcgcggttaagttgccgattagcgcttcgatgagtgactgtaattcaggacggttgtttttctgcgacatagtgatttccttgagaagaaacggcggcgtgttgccagcgatcgttgcgatgtggatggccggtcaatagctcgatggtttcgcgtgtctgcgggctggcatcctgtggatgaccaccggcgcgcagacgctccagttcgctaatcaggatttgatgccgcggctggctcaagcgaaaacgaaacgcgccatacatagccagtaaggccagcaggccggggccaacgaggaatacccaccagataccattcagcgcggcggtattctgcgtttcggcgcctttggtgaatccaaaggcttccagcgccaggccgacgataaacagcgccagcgcctgggagaatttgcgcgtcagcatcatcacccctgcgtagatcccttcgcgccgcacgccggtgtaggcttcatcgatatcgggcaggaaattgtagacattccatgggatgagataggtgccgccgcgggcgatgcccatcacgattgcgccgccgagcagcagccaggaaagatggctgaaagcggcggtcagttggctgaaccacagtagcgcgcagaggatcagcgcgatagccaccttataggcgttgccgttgccgacgcggatgcaaagccaggtaaataaagggatcgcgaagaactgaaacagcgtcatcagactcatggcttgcgaagccagtgaggtgccgacacgtagcacgtaggtcatgtagtgcataaacagcgagccgaaaatatccaacgccaccgcgccaccgacatacatcatgatatgaatacggaaggtccgcagacggaaggtagaggccatttcgcgatacagcgaacgcagcgttttgcctaaaccttgctgcgtttgcggtggtgggagatgctcgcgctcccaggtaccgcgccagacgaagatccacggcaaggcaaaaagcagggcaaagataatgccgatatagagaaacgcctgcgatttatcggcgacgtgggccatgatttgcccggggatcagcgccgcgagaaaggctgtcgcctgagcgaatagcattcgtgccccggacattttcgagcgcaaatcatagcgcgcggtcatctctgcaggcagcgtatcgtaaggcaccattagcagggtgaagacggtgctgaatagtagataggtaccgaggtaccaggcgtagccaaaaccacttatccacatcagagcgaaacagagcgatagcggcgcgccgagaataaagaagatccgtcgccgccccaacgggtgcgaatgttgtcggtaatgtagcccatcaccgggtccgtgatgccgtcccaaatcttggcgatggcgaaaatagaggccgcagcggcgggcgagagcccggcgacttcaatataaaagtagagcagccacaggccggtgatggtcatcgcaccgctgccgaaaatatcgcccatcccccagcagaggatattgcgggttttgacttctcgttgcggggtcactgtcctcgtcatgagcgtttctctttggtaaggaatgcgagattgcacagtaaaagaggaggagggggcgaaaatcccaacagtcggtttttcgtaccgttctgcgagcagcatgccaaatggcgacaaaatgaaataaatcccgtgatactgctcacatatgcagcggtttaagagggcttttactgtgataacggccctgttttcatttttcccgcaggcaaattttgcgcgtaatctcacgttttgcaccagagcgtgacggcgaatgtgaaatggtacgcagatatttccgcggtagcgatttcgaccctacgctgaacgtgagagagatggtgagatagctcccacgttgatttccaggacatgctatgaacatttatctttcgcagcgccatccccatgcggatggcgtgacgcctgatactgaactctttcaacaggcgctggacgaactggcgcaggcgggtggcggccggttggtggttgaatgcggcaggtacgcgctcggcggtttacggataggctcgaacacctgtttgtggctgtcgtcgggcgccgaacttatcgttagcgaaaactatgatgactttgctcaggcgacggcgctgagccgggcggaatcttcagatcgggcctttctgtatgctgtggatgcacagaatattactatctgcggcggcggcgagatttacggcagcgctgacggctggttctcccgtggcgttgatgccatgggctaccgcacgccagccagggcgcgcccgcggatcattttgctggagaattgccgtcgcgtccggctggaaaacatcaccgtacgacatgccccgatgtggacaatccatctggtctcctgcacgggcgtggtggttgacggcgttaccgtcgacaatgatttgacgatggccaataccgatgcgctggatatcgacagctgccagcaggtccatatcgccaatagctatttcagcgcggcggatgatgccatctgtttgaaaactaccgataaacctgagcggatccagcgaccgttgcgtcaggtaactatcgttaactgcacgctgcgctcgaaaagctgcgcctttaaaatcggtactgaaacctggcaggatattgaagatgtgctggtgagtaactgcactatctttgactccaatcgcggcattggcctgatatcccgcgacggcgggcggctacggcggatgatttttagcagcattgcttttgattgcgtgagcgcgccggcctgtcattggggcgaggcggacccagttttcctttccgcacgccgtcgcgatccggcgattgaacccggcgaaatctcagagatccagttccgcgggctggttggcgagtgcgaaggcgcgataaacctgcatagtgaaacgccaggtcagatccggcgcattctgtttgacggcgtgcagctaacccagaagctgaacctggcagcggagcaggggctttatgatatccgcccgccgtgcaatccgatgtcgccgaccgggatgggattgataacgcctggtgtctgaatccgcaaagcggccgagtttggggtgtcgaaccttatcccggcggtttgccggtactgtatgctaacggcgtagcgggtctgacactgcgcgaatttgattatcagcgcccgataccattaccggcagcctggaaccctaacgcgctatgtctggaaaacggcgataattagcgaggaaataagagaggaaggtgccccggcgattgctccggggcaggtcgaacttattcttcggcggcatagccctgcggcggcagcttgcgattatccagccacgcagagttagcttccatacgcaggcggccatcaacaaaccagctcaccaccagcggatagatatcgtgctcctgcgcctgaacgcgggcggtaacgtcatcttcgctgtcttccggaaataccggcacccgagcctgtaagatcaccggtccgccgtcgagttcgtcggtgacgaaatgcaccgaggtgccatgttcctcatcaccgttttccagcgcctggcgatgagtatgcagccctggatatttcggcagcagagaaggatggatattcagcaagcgtccctgatagtggccaacaaacgccgggctgaggatgcgcatgtagcccgccaacaccaccagatcgggttggaagacatcgatttgctgcatcagctcgcggtcgaaggcttcgcggctttcgaacgctttcggcgagagcgcaaaggccggaataccggcctcgcgggcgcgctcaaggccgaatgcttcggccttattgctgaataccgcacgcagggtgccgttgatttgcttccggtcgcaggcatcaataatcgcctgtaaattactgccgttaccggaaatcagcaccacaatgtttttcattcaatgaccacgcgttgttcggcatcggatgccttgatgtaaccgattttccaggcgttttcaccctgctcgttcagcagggcgatggctttatccgcctcggctgccggcagcgcgaccagcatgccgacgccgcagttaaaggtgcggtacatttcgtggctgctgacattaccggcggtttgcagccagttgaagacttccggccactgccaggaggactcgtcgattaccgcctgggtgttgtccggcagtacgcgcgggatattttcccagaagccgccgccggtcaggtgggcgatggcgtgaacgtcgacgttggcaatcagattcagaatcgatttgacatagatgcgggtcggcgccagcaggtggtcggccagcggtttgccgtggaggtcggtggtctgcggatcaacgccgctgacttcgataattttacgcaccagcgagtagccgttagagtgcgggccgctggaggcaagcgcgaccagtacgtcgccgtcagccactttgctgccgtcgatgatttctgatttttctaccacgccgacgcagaaaccggccacgtcataatcttcaccatggtacatacccggcatctctgccgtttctccgccaaccagcgcgcaaccggactgtaagcagccttcggcgataccgttgattacgcttgccgcagtatccacgtccagtttaccggtcgcgtagtagtcgaggaaaaacagcggctccgcgccctgaacgaccagatcattgacgcacatggcgaccagatcgataccgattgtgttgtgacgtttaaggtccattgccagacgcagcttggtgccgacgccgtcggtaccggagaccagtaccggttcgcggtatttctgcggcagagcgcacagcgcgccgaatccgcccagtccgcccatcacttccgggcgacgggttttcttcaccacgcccttaatacggtcgacgagagcgttgcctgcatcaatatccacgccggcatctttatagctgagagaggttttatcggtcactgcgaagtctccacgcgtttgcggtagcaagaaaaatcggcgcaattctaacagggaaagcaaacgtttgcgagcctgctttacactcgatttaaaacggctaacagatgagcaaatttgatactgttcacgaaaatgaaaccgggtacagtcttctgcttgcctcgcctttaatgaatgatcattatgccaatgaaaccggtttctgtttggtgaaaagcgcataacgatcgtctatagggagagtatatgtccggattcaaagaaggttttttgtggggcggcgcggtagcggcgcatcagcttgagggcggctggcaagaaggagggaaggggattagcgtcgctgacgtgatgaccgcaggcgcccatggggtgccgcgaacgatcaccgacggcgtactgcctggtcataactatcccaaccatgaggcaattgatttttatcatcgttataaagaagacgtagcgctgtttgccgaactgggatttaagtgtttccgtacttcaattgcctggacgcgcatttttccgctgggcgatgagctggagcccaatgaagcgggcctgcaattctatgacgatctgtttgacgagtgcctgaaatatggtatcgaaccggtgatcacgctctcccattttgagatgccttaccacctggtgactgaatacggcggatggcgcaaccgtaaactcattgatttctttgtccgctttgcgaaggtggtgtttacccgctatcagcacaaagtgaagtactggatgacctttaacgagatcaacaaccaggctaacttccatgaagatttcgccccctttaccaactccggcctgaagtatcagcccggagaagaccgtgagccggtgatgtttcaggccgcccattatgaactggtggccagcgcgctggcggtcaaggcggctcgtgagattaattcggacctgcagattggctgcatgatcgcgatgtgtcctatctatccgcttacctgcgcgccggacgacatcatgatggcgatgaacgccatgcatcgtcgttactggtttaccgatgtgcacgtgcgcggcagctatccgcagcatctgctcaactacttcgcgcgccgcggttttacgctggatatcaccgacgccgatcgcctggcgttaaaagagggctgcgtcgactatattggttttagctactatatgtccttcgccaccaaagcgactgacgataatccgcacctggattacgacgaaagcaccagcctggtctccaatccttacgtcaagaaatcggattggggctggcagattgacccggttggtctgcgctactcgctcaactggttctgggatcactatcagttgccgctgtttatcgttgaaaacggctttggcgccattgacgtgcgtgaagctgacggcagcgtggacgaccagtaccgtatcgagtatctcagcgcccatattgccgaaatgaaaaaagcggtggtggaagatggcgtcgatctgatggggtataccccgtggggttgtatcgatctggtctccgccggtaccggcgagatgaaaaagcgctatggatttatctttgtcgataaagataacgatggtcgcggcacgttggcccgtagccgtaaaaaatcctttgcctggtatcagcaggttattgccagtaacggcgaaaacctgtagccgccagcaagcgtcacgttgccagagataaaagccgaaggggaacctcggctttttttgtttgttttataatgtgtaacaatccataaatcactttgtttgatatacgtcaagcaagatgggtatggcgcaatccgcaaaaagcggtataatcccgcgattttttttgtggctgccctcagaggagaaagagaatgaagatcgtggaagtgaaacatccactcgtcaaacacaagctgggcctgatgcgtgagcatgacatcagtactaaacgcttccgtgaactcgcctcagaggttggtagcttactgacctacgaagcaaccgccgatctcgctaccgagcgtgtcactatcgaaggctggaacggtccggtcgaagttgagcagatcaaaggtaagaaaattaccgtagtgcctatcctgcgtgccggtctgggtatgatggaaggcgtgctggagcacgtgccgagcgcgcgtatcagcgtggttggtatctaccgtgatgaagaaacgctggagccggttccttatttccagaagctggtttcaaacattgacgagcgtatggcgctggtggttgacccgatgctggcaaccggtggttcgatgatcgcgaccatcgacctgctgaaaaaagcgggctgctcgagcattaaggtgctggtgctggtggcggcgccggaaggcattgccgcgctggagaaagcgcatcctgacgtcgagctgtacaccgcctccgtcgaccagggcctcaacgagcacggatacattattccgggcctcggcgatgccggcgataagattttcggtaccaaataaatgatgaagtgataaaaagccgactttgagagtcggcttttttttgaataaatcacgcccacaacaaataacaaacgactctcagaggataatattatgacgcgccgtgcaatcggggtgagtgaaagaccgccgcttttacagacaatcccgcttagtttgcaacatctgttcgccatgtttggcgcaacggttctggtgcctatcctgttccacattaacccggctaccgtactgctgtttaacggcatcggtacgctgttgtacctctttatctgtaaaggcaaaattccggcctatctggggtcgagcttcgcctttatctccccggtgctactattgttgccgctgggttatgaagtggcgctcggcggtttcattatgtgcggcgtcctgttctgcatcgtctcctttattgtcaaaaaagccggtaccggctggctggatgtgatgttcccgccggcggcgatgggcgccatcgtggcggttatcggcctggaactggcgggcgtagcggcgaacatggccgggctgctgccggctgacggccaagcgcccgacagcaaaaccattattatttcgatggtgacgctggcggtgacggtttttggttccgtactgttccgcggctttctggcgattatcccgattcttatcggcgtgctggtgggctatgcgctctcctttgtgatgggcgttgtcgatacgacgcctatcgccgaagcgcactggtttgcactgccgaccttctacacccgcgctttgagtggtttgccattttcactattttgcctgccgcgctggtggtgatcgccgagcacgtggggcacctggtggtaaccgccaacatcgttaagcgcgatctgatccgcgatccgggtctgcaccgctccatgttcgccaacgggctgtcgacgattgtctccggtttctttggctcaacgccaaacaccacctacggtgaaaatatcggcgtgatggcgattacccgcgtatacagtacctgggttattggcggcgcggcgattatcgcgattctgctctcctgcgtcggcaagctggcggcggcgattcagattatcccggtaccggtgatgggcggggtttctctgctgctgtacggggtgattggcgcatccggtatccgcgtgctgatcgaatcaaaagtcgattacagcaaagcgcagaacctgattctgacctcagtcattctgatcatcggcgtgagcggcgcgaaggtgcatattggcgcggcggagctgaaaggcatggcgctggcgacgatcgtcggtatctgcctgagcctgatctttaaactgatcagcgtcctgcgtccggaagaagtggtgctggacgccgcggatagcgaagaagcgaaataacgatcctcataccgggcagcgatcctgcccggttctctcctgacctaaaactgtgttaaactcttcgcgtttttctgtaagcctatgttgaggtccatctgaacgctccggcacagctctctttgccactgtatcttcctgacgacgaaacgttcgcgagtttctggccgggtgataatccttccctacttgccgctctgcagaacgtactgcggcaggaacacagcggatacatctatatctggtctcgcgaaggcgcggggcgtagccaccttttgcatgccgcctgcgctgagttatcccagcgtggcgatgccgtcggctacgtgccgttggataagcgcacgtggttcgtgccggaagtgctggacggcatggagcaactggcgctggtgtgcatcgataacatcgaatgcgtggcgggggacgagccctgggagatggctatctttaatctctataaccgtattctcgaatcaggtaaaacccgcctgctgatcaccggcgattgcccgccgcgtcagctgcatctcggcttgccggatctcgcctcgcgccttgactgggggcaaatctataagctgcagccgctgtcggatgaagataagctgcaggcgctgcagctgcgcgccagattgcgtggtttcgagatgccggaagacgtctgccgattcctgctcaagcggctggatagagaaatgcgctcgctgtttatgacgctcgatcagctcgatcacgcatcgattaccgcccaacgaaaactgacgatcccattcgttaaagagatcctgaagctttaagccgaaagcggcgccagttcctgctctgccagcccggttagctgcgccaccagcgcaggggcgagaccgctacgtaacatcgcggcggcgatacgctgtgcttcttctttccggccttcttgccggccctcttgccgtccctgaagcaaaccgcgctccagcccttgctgctcaagatattctgcaatagtcatcagcgtctccttatgttgaaaaaatcgcgccgcgggcaagaccggcggcgcgtaggggttagctgacgatttccagtacctgttccggcgggcggccgatacgcgcctggccgtggctgaccacgatgggccgttcgatgagcttcgggttctcgaccatggcctgaatcaacgcctcttcgctgagctgtgggtcggcgagattgagcgacttatacagatcttctttctggcgcatcagttcacgggcgctgctcatattcagcattttcaacagctggcgtagcgtcgcggcatccggcggcgtctccagatacagcaccacttcagggtcgatgccgttggctttcagcaggctgagcgtgtcacggctcttcgagcagcgagggttgtggtaaatttttaccgcgtcagacatgtggtctccttacattttctgataggggcggaatctttcctgcagctggcgcagctggtcgatgcgagcgtcgtagcgcgcctgctgcaaactgcccaatttcacttgcgaactggcgctgctcagtagcgagatggcctggtcaagcctaccggccagcgccatgccttcggccctcgccgccagctcctggtcgcgatgacccaatgcgccttccgcctgcgccaacaggtcccaaccgttgccgtcatctttattgttaaaggtgtagcggttgagaatggtcgcggcttccgccggctgcccgccctgtacgtaggcgttggcaaggttcagctgcaggaccggatcggtacggatctctttggcgtttttcagacggttaatcgcgtcggtagtctttttctgcccaagatcgatatcggtggcgagatccaggtaccagggattttgtgggtcggcaccgagcagcggctgtagcgttttgcgcgcctgatcgtagttattgctctccatggccagtagcgcgcggccatactgcgcggcgtgctgttcacggatgttcccttttgaccaggcgtcaagcagatcgctaccgagcttattttctccggagttgtacataccgagggtacgggccttggcgagatagaaatccgccgacgactggactaccaccgggcgcatctgattggcgcggttacgggcgtcggccagacggctctccggcagtgggtgagtgagcagcatttccggtgggcggctggaatagcgggattcgtcgagtaatttacccataaacgccggcatggcctgcggatcgaaaccggagcgctgcagtacctgaataccgatgcggtcggcttcttcttcgttctgacgagtgaagctaatcatcccctgttgggtaccagccagggtgccggttaatgccgccatccccgcctgcgggctggccatcgccagcagaatagagcccagcgcgccaacccaggttagcggcgcgctacgtttttgatcttccatcgcacgcgccagatggcgctgggtgacgtgagagatttcgtgcgccattaccgaggcgagctggctttcgttatccgcatagcggaacagcgccgagtgcagcaccacgttgccgccgaagaaggcaaaggcgttaatctgatcgttattaatcagataaaagtggaacggcgtacgtacggagttagcgtgagcgaccaggcgcatgcccagcccgttaatgtattgcaccaacagcgggtcgtttatcagcggcgcgctgccgcgtagctggcgtacgtagtaatcccccatctgcatttcctgaccgatggaaagggtgcttcctgccgaggtgcccatatccggcagcgtatccgccgagtcagcggcggcaggtaatatcgtccccagcgtcaacgacgcgacggcggcggccaccagcgttttctttaactgcctgaacataacctctgtcctgtaatgtgggtgtgccagtttgaccggttgtgcggcccaatgttcccatgccgcagattcagcgagtttagctgtcgttgatggcgttgaaaatatgatattcgcacagttgtgcaggtttgtgtcacagccaataaaaagcgaagtcttttttgtgacacttagatacaattcccaggattgtggcgatttgcgcttcagggaagggtttatgcttgagatgttaatgcagtggtatcgtcgccgtttcagcgatccggaagcgatagcgctgctggtaattctgctggccggcttcggcattatgttcttttttagcgggctgctggcgccgctgctggtcgccatcgtgctggcctatctgctggagtggccgaccgttcgcctggagcgtatcggcttgtcgcgaacctgggctacgtcgctggtgctggtgctatttgtcggtattttgctgttgatggcctttgtggtgatgccggtggcctggcaacagggcatttatctcatccgcgatatgcctggtatgctcaataagctttccgatttcgccgccacactgccgcggcgctatccggcattgatggatgccggcatcattgatgcaatggccgaaaatatgcgcagccgcatgctgaccgttggcgattcggtagtgaagtattcgctcgcctcgctggtcggcctgctgacgctggcggtttatctggtcctggttccgctgatggtcttcttcctgctgaaagataaacagcagatgctcaatgccgtacgccgcgtattaccgcgtaatcgcggcctggcggggcaggtgtggaaagagatgaaccagcagattaccaactatatccgcggcaaggtgctggagatgattgtcgtcggcgtcgccacctggataggcttcattctctttggtctcaactactcgctgctgctggcggtgctggtgggattctcggtgctgattccatatatcggcgcttttgtggtcaccattccggtggtcggcgtggcgttgttccagttcggcgcgggtaccgagttctggagcctgtttgccgtatacctgattattcaggggctggatggcaacctgctggtgccggttctcttctcagaggcggtgaatttacatccactggtgattattctgtcggtggtgattttcggcgggctgtggggtttctgggggtattcttcgcgattccgctggcgacgttaatcaaggcggtggttcacgcctggcctgatggaatggttattgaagacgagtgacgcgttgactgactcaaaaaaaacgccgggcgatttattatcccggcgtttttatttagacgttatgcgttttctttcagccagttcagcacgacatcgtggtgattgctggttttgaagttatcaaacacatgttcaatcttgccgtcagcatcaatgaggaagctaatacgatgaataccatcgtaggttttccccataaatgatttttcgccccagacgccgaactgttcgcagacctgatgatcttcatcagacagcagcgtaaagttcagcagctctttttcggcaaaacgggacagcttttctggtttatcagtgctgatacccagaacttcgacgcccgcttttttcaggtcgtccatattatcgcgtaaaccgcacgcttgtacggtgcagcctggggtcatggctttcgggtaaaaataaaccagaacacgctgtccctggaagtcggttaaatttacttcctcgccgtcctggtccggtaagctaaatttcggtgcgatatcaccggctttcagtggggtcattggttaaactccatcctgttcatcatgctgtgaataattaacgatgttaatactgccttgtgcgctcagttctgtacatagtgctttgaacgcttgctcgatatttgtcgtgttttgcgaggcaggactgtgtgcggtgatttgaataaatagctgagcggcgtctttatcttctcccggttgagtacgggagaccagttcggcgatattcatattccacgtgtcgcacagcgcggtaaagcgctcaataatatgcggcgagtccggcacctctacctggatccaaaccgtattcggcatcgcctgcggcgggcgggcggaggtgcgcttcattacgatcagcaaatccagctcggctccttttaacggcagcgttgattcgatcaggttaatcgcgttccacgtgccggaaagcagcattataaacgtgaactcgtcgccgagcatggccaaccggctgtcttcaatattgcagccgcagctgctgacgtggcgagtgattgtgtttacgatgccggggcggtctgcgcccagagcggtaatcaccagatagtgttgtaatgaggctgtcaaacctgttcttcctttaaaaaggtgaggtaacattaggaaagcataaaaaaaaccggcgtacaacatcccagatggcgttgggtctcttgcttttattgcggcaccaaacgtaacattgagaatcttgtcccacttctgctctgaggatggcccatgttcacgggaagtattgtagcgcttgtcacgccgatggatgataacggtaatgtctgccggtcaagcctgaaaaaactgattgattaccatgtcgccaacggaacctcggcgattgtttcggtagggactaccggcgaatccgcaacattgagccatgaagagcatggcgacgtcgtgatgatgacccttgagctggccgatggccgcatcccggtcattgcaggtaccggtgcaaatgcaaccgcagaggcgattagcctgaccaaacgtttcaacgatagcggtgttgtcggctgcctgacggtcactccttattataatcgtccgacccaggaaggcctgttccaacactttaaagctatcgctgaacatactgacctgccgcaaattctgtataatgtgccgtcccgtaccggttgcgatatgctgccggaaaccgttggccgcctggcggaaattaaaaatattgtcggtattaaggaagctacagggaacttaagtcgtgttcaccagatcaaagagctggtttcagatgactttattctgctgagcggcgatgacgcgaccggcatggactttatccagctcggcggcgtcggcgttatttccgtcacggcgaacgtcgccgcccgtgaaatggccgacatgtgccgactggcgatggcggggcaattcgcggaagctcgcgcgattaaccagcgtctgatgccgctgcatacaaaattatttgtcgaacccaacccgatcccagtcaaatgggcttgtaaggcgttgggacttgtagcgaccgacacgctgcgcctgccaatgacgccgattaccgaagctggtacgaaagcggttaccgcagcgctgaagcatgccggtttgctgtagagtttagggagatttgatggcttactcagtacagaagtcgcgcctggcgaaggttgcgggtgtttcgctggttttactcctcgcggcctgtagttctgactcgcgctataagcgtcaggttagcggcgacgaggcttatttagatgccgcgccgctcagtgaacttcacgccccggcggggatgatcctgccgctgcagactggcgactataacattccggttgctgcgagcaccggtgcggtaggcaaggcgctggacattcgtccgccggctcagccgttagccctggtcagcggcgcacgtacccagtttaacggcgacacctctaccctgatggtggaaaacagccgcagcggttctttatgggcgcaggtggttagcatcgtacaggcgaaaaactacaccatcaccaagcgtgacgatgcaggccagacgctgaataccgattgggtagagtggaaccgccttgatgaagaccagcagtaccgtggccgttatcaaatctccgttaagccgcagggttatcagcaggcggtggtggtgaagctggtgaacctggagcaggcgggcaagcccgtatctgacccggcgtctctgcagcgctacagcacctcgatgctgaacgttatctcttccggtcttgattccaacgccactaatgcgcagaacgcggcgcagagaagcgctggcgcgaccttcgacgtgcagagcgcggcggatgacaccggcttgcctatgctggtggtgcgcgcgccgttcaacatggtatggcagaaactgccggccgcgcttgaaaaagtgggcatgaaggtgaccgacagcactcgctcccagggcagcatggcggtaacttacaagccgctgtctgacagcagctggcaggaactgggcgcaagcgatccgcagttggtctctggcgactataaactgcaggtcggcgatctcgataaccgcagtagtctgcagtttatcgacccgaaaggccacaccctgacgcagtcgcaaaatgacgccctggtagccgtattccaggccgcatttaacaagtaataaaaagggctggagcaatccggccctttttaatgtatagtgacgcaaacgtgtgcgtagccgcaaagtccggtaatttgctggttttgcctacgggcgggaaggtaattttttggcttaatatcactggagtggtgaaagatgaaaaagcaagctgagttgtatcgtggcaaagcgaaaacggtatacagcaccgaaaacccggatctgctggtacttgaattccgtaacgatacgtcagcaggggatggcgcccgcatcgagcagttcgatcgtaaaggtatggtgaataacaaattcaaccatttcattatgagcaagctggaagaagccggtatcccgacccaaatggaagcgctgctttccgatactgaatgcctggtgaaaaagctggatatggtgccggtagaatgcgtgattcgtaaccgcgcggcgggttcactggtgaaacgcctgggtattgaagaaggtatcgaactgactccgccgttgttcgacctgttcctgaaaaacgacgccatgcacgacccgatggtcaacgaatcctactgtgagacgttcggctgggtgaataaagaaaacctggcgcgcatgaaggaacttagctacaaagcgaacgacgtactcagcaagctgtttgatgatgccggtctgattctggtcgacttcaagctggagtttgggctgttcaaaggtgaagtagtgcttggcgatgaattctctccggacggtagccgtctgtgggataaaaacaccctcgataaaatggacaaagatcgcttccgccagagcctcggcggtttgatcgaagcttacgaagaagtggcccaccgtctgggcgtcaagctcgactaatcctctccgcgccggaagaaatcatctcttctggcgctcttattagttgtttcctgtggtaatcctccgctgaaccgcctacgatctctcatattcgtaacatgatggaatagaggtgcttatgcgctggcaagggcgtcgtgaaagcgacaatgtggaagacagacgtagtgattcaggttcgccgctgggaggcggcggtggcggtttccgtattccaagcggtaaaggcggcatcgtcctgctaattatcgttctggtggcgggttactatggcgtggatttaaccggtatgttgaccggcgaacccatgccgcagcagcagacttcaacccagcgttcgatcagcccgaaggatgatgaagcggcgaagttcacctccgttattctggccaccactgaagatacctgggggcctatttttgaaaagatggggcggcaatatgttcagccgaagctggtgatgtatcgcggcgcaacccgtaccggttgcggcaccggtcaatcggtgatggggccgttctactgcccggcggacagtacggtctatatcgacctgtcattctatgacgagatgaaaaacaaactcggcgctgacggcgactttgcgcagggctacgtgattgcgcacgaagtcggccaccatgtgcagaagctgctaggcatcgaacctaaggtccgtcagatgcagcagcaggcttcgcagactgaagtgaaccgcctgtcggtgaaaatggagctgcaggcagactgctttgcgggcgtctggggcaataacatgcagaaacaggatgtgatggaaaccggcgatctgcaggaggcgctcaatgccgctgaggccatcggcgacgatcgtctgcaggagcagagtcagggccgcgtggtgccggacagtttcacccatgggacctcacagcagcgctatacgtggttcaaacgcggtttcgatagcggcgatccttcacagtgtaataccttcggcagcgcgcttcgctaacgtttgcctatggaaacgctgcttgacctgaccgcgcagatggcgcgcgagggtattcgtcgcctgctggtgctcagcggcgacgaacattggtgtctggctcaggccgttgagctgcgagagcggctggacggcgatagtctatgggtcggcgccttgccgcagcaggaaccctgcgtggcgccgggcgcgctgaaaacgctgctcgggcgcgagttcctgcatgccttcttcgatgctcgtcacggttttgacgtggcggcttttgctgccctcggcggtaccctgcgcgccggcagttggttagtgctcctcgcgccagattttgcccgctggcctgagcaggcggatggtgattcgctgcgctggagcgatacgtctgaaccgatcgccacccctaactttgtccaccgttgtcttcaactctttagtgcggatcctgaggtcgcgctgtggcgacagggcgacggcttacggttgccggaggccgtaacgcgcaggcactggcatgctgccgatggttacccgcaggccgaacaggccgctattctcacttcgctgacgtcgtcgccccacaaattgccgccgttaccgccgggcgcgggcgcggtaaatctgcgctggcgggaatgttgattcatcagctagccggttccgccatcgttaccgcgccgacgcgcgacgcgacagcggtcatcgccgcttttgcgggacagaagatgcgctttatggcgcctgatgccctgctggcaagcgacgcgaaagccgactggctggtggtcgatgaggccgccgctatccctgcgccgacgctacgccagctgacggcgcgttttcctcatacgctgttaacgacgacggttcagggctatgagggtaccggtcgcggcttcttattgaagttctgcgccagtttcccaacgctacggcggtataacctgtcgtcgccgattcgctgggcgccgggttgcccgttggagtcggttatcgatcggctattgttatttaacgatgaggcgtttctcctggcgccgcacggggaaccgcagctggagacgttaactcagcgtgcctggcgcgaacaaccctcgcgcccatcagaggcttatcaactgctttccggcgcgcattaccgcacttcaccactggatttgcgcaggatgatggatgcgccaggccagcattttaccgtggctcgctgcggggatggcgtcgctggcgcggtgtggctggtggaggagggagggcttgaacctgaacttagccgcgccgtctgggccggatatcgccgcccgcgcggcaatcttgtggcgcagtcattggccgcgcatggcggcagcccgctggcggcgacgctgaccggcagacgagtcagccgtattgccgtacatccagcgcgccagcgcgaagggctggggcagcgtttaatagcccatgccgtcaagcagacgcgcggctgtgactatctctccgtcagctttggttatacccctgaactatggcgcttctggcagcgctgcggttttctgctggtgcggatggggactcatcgcgaggcgagcagcggctgctatacggcgatggcgctttatccgctcagtgcagcggggcagcagctggcctggcgcgaacatcaacggctggcgcgggatgaacgctggctaagtcagtggcgtgatgatcgcgctccggtgacggcggatgaaacagctatgcttactgaggaggactggctggagattgccggttttgcctttgcgcatcgtccactgctgacggcggccgggagcctgaaccggcttttgcaggcgacgccgctgccgttagtggcgcttcgtgcgcgattagcgcagcacgatgaggcagcgctgtgcgcaaaccttggtttatccggacgaaaggcgctgttggggcgactgcgggaagaggcggcgacggcactgtcagacttcgatcccgctcgtgcgcaacggctggacgagtgggtcaggacgctgcaatttttttaactaactcattcagttaaatggcatggtcatattctctgcgcggcgtaaactgccttgcatcaatcaggagccagattcctgtttatctgagacatcaggagacaaccatgaaacacgatcactttattgttcagagcccggcgacgcctgcgcaacagttgctgctgctgtttcatggcgttggcgacaatccggtttcgatggggcaaataggtagctggtttgcgccgctgtttcccaacgcgctcattgtcagtattggtggcgcggaaccctgcggtccggcgccggcgcggcagtggttttcggtgcaaggcgtgacggaagagaatcgtcagcagcgcattgatgccattatgccgacctttattgaaacggtgcgctactggcaaaaacagagcggtttaggtgcgcaggcaacggcactgatcggtttttcgcagggtgcgattatgtcgcttgagagtattaaagccgagccaggactggcgtcgcgggtgattgcctttaacggccgttacgcgacgctgccgcaaacggcgaccacgcaaaccaccgtgcatctgatccacggcggcgaggatcgggtgatcgatctggcgtgggcggtctccgcgcaggagcggctgcaggagctgggggagatgtcacgctggatatcgttgaagatctcggacatgccattgatgaccgtagtatgcagtttgccctcgaccgtctgcgttataccgtaccgaagcactattttgatgaagcgttgagcggcggaacgccgaaagatgacgatattatcgaaatgctgtaatggccccgcggtacaacgtcggctgggatgggtagcccgggtaaggcgtcagccgctacccgggaatgcatccagcctacgcgatggcggggagcgcaggtttacttcttcggctggtctttgttcggccagtcgtcgtcgtcatcccacttgctattgaagtcgcgatgcggcggcagatccggtttgttatcgagatattttttcgggtcgacgcgattaagatctttaatcacgttgatcatcacgccgactaaaaataccaacaccagaatccaccagtggttgataagccattccatgctgtgtcctctttttaccccgcagcggcgctgcagggtaatcgttattgtcgtcaggcgaccagttgttccatgatgcgttgatacatccgcgccagcagctgcaggtcggcggcattgacgcattcattaattttatgaatggtcgcattcaccgggcccagttcaactacctgcgcgcccatgcgggcgataaatcgtccatcagaggtaccaccggtggttaacaactgcggttttacttcattatagtgctcaatggcgttcactaccgcatcgacaagattgccgcggccggtcaggaatggctggccggaaagccaccattcgacggtatagcgcagctgatatttttccagcagcgcgatgatgcgcgccttaatcatctcgtcggtcagctcggtgctgaaacggaagttaaactgaacgaacatatcgcctgggatgacgttgttactgccggtgccggactgcacgttggcgatttgcatgctggtcggcgggaagtattcgttgcctttatcccattcgatagccaccagctccgccagcatcggcgccgcgcggtgtaccgggttatcggcgaggtgcggataagcgacgtggccctggacaccatgaatcgtcaggttacaggtgagtgaaccgcgacggccatttttcacgacatcgccaaccacttcggtacttgaaggttcgccgaccaggcagtaatcaaggcgttcgttacgcgccatcagcgtttcgactacttttaccgtgccatgggtggcgctggcttcttcatcagaggtgatgagaaacgccagacggcctttgtgattagggtactgcgcgacaaagcgctcggcggcgacaaccatcgccgccaacgaccctttcatatccgccgcgccgcggccaaacagcatgccatcgcggatagtcggttcaaacggcggattgatccagcggtcggcgtcgccggccggcaccacatcggtatggccggcaaaggccagcgtttcaccctgtccgcgccaggcccagaaattttgcgtatcgccgaagtccatcgcttcaacggtaaaaccgatcgcccgcagacgttcaatcattaacgcctggcatcccgcatcattggggctaagggaagggcggcgaataagctgctgagccagctcaatgaccgggcaagacatagactacacctcgttaataaatttttcgtagtttgcttcgctaaagcccagcagcataggctgaccgggcgcgcagagcaatgggcgtttgataattgccggcatttccagcatcaacgccgccgccgcatcggcattatcgataccggcgcggaccgattcatcgagtttgcgccaggtggtaccacgggtgttaagcagcgcttcccagcctaattcggcaataaaggtattcagcaattcgcggtccagtccgtcaacgcgatagtcatggaagcgatagtctatctgatgggtttccagccagcggcgggcctttttaatggtgtcgcagtttttgatgccgtacatggtcaacataattaaaccttcacgttaaaagaatatgtttctcagtcttttccgaatatataagttttgttaaataatacgtgaatcggctggataaatataacttttcagccttgtctgattaaaatttgttctttttcgcgacacactaagataatgaataacaagaattctgatattaacaaaatgttgcgtaatgttgctctatgtcacattaaatttacatgaaccggcttatggtagcggcaagccagagtattcaaggcttgcggcgacaagaaaagcgattagagcgatagatcggacgaacttctcctgagcggggaaattacctaaaatcgccataataataagagaggctattatgattgaacatgaactggggaactggaaagattttatcgaagacatgctgcgtaaataaaatctggctttgtcggtactgaagacaatgtttgacccatgaaaaaggcgactgtgacagtcgccttttctgttatttgaaggtttattccggccgctctttcagcgggaagcggcggcgcaccaacacgaagaatagcggcacaaagaagatggccagcacggtggcggagatcatcccacccatgacgccggtaccgaccgcgtgctggctgccggaacctgcgccggtactggtggccattggcagcacgccgaagataaacgccagcgaggtcatcagtatcgggcgcagacgctgacggcaggccgatagcgtggcggtcagcagatcttcgcctttctggttcagttcgttggcgaactcgacgatcaggatggcgttttttgccgacaagccgatgaccgtcagcaggccgacctggaagtagacgtcgttttccaggccgcgcatccaggtcgccagcagcgcgccgataactcccagcggcactaccagcatcaccgagaacggtaccgaccagctttcatacagcgccgccagacacaggaagaccaccagcagtgaaatggcgtacagggcaggcgcctgagcgccagagaggcgttcctggtaggacatcgccgtccattcaaggccgaaaccgttcgggagctgtttggctaactcttccatgatggtcatggcggtaccggtactgacgcctggcgcggcttcaccgacgatctcgaccgctgagtagccattgtaacgttcgaggcgcggtgaacccgtttcccaacgcgaggtggcgaaggcggagaacggtaccatggtgccgctactgttacgcacataccacaaattgatatcgtccggcagcatgcgatattttgccgccgcctggacgtaaaccttcttcacgcgtccgcgatccataaagtcgtttacgtagctcgaaccccaggcggtttgcagcgtatcgttaatatcatcaatggagaccccagcgcctgggctttacgctggtcgatatcaacctgcagctgcggactgtcgtccaggccgttgtggcgaacgcgggtgagctggtcgttgttagccgccagctccagcagcttgtcgcgcgccgacatcagcgcctcgtggccgttaccggcgtggtcttcgagctccatatcgaagcccgcggagctgccaaggccgctgatggccggtgggctgctggcaaaaacgcgcgcttctttaattttattgaaggctttggtcgcgcgctcaatgatagcgaacgaggagccggtatttgggtcgcgctggtcccagtctttcagacggacaaacatacgtgcgacgttctggccattgccgccggggccggagccgacggtagcaaacaccgactcgacgttactcttctcgttattgaggaaataatcttccgctttctgcaccactttcagcgtctgctgttgggtggagccgctcgggagctgtatggaggtggtgaacataccgcggtcttccagcggcaggaacgaagtcggcagatgcaggaacagcagcaccatgccgccgagcagcaggacgtaaatcaaaatccagcgcagcgagcggtggagaattttgcccacgaaagtttcatagcggcttgcgctgcggttgaaggtgcggttaaaccagccgaagaaccctgtttgaccatgtacctcgcctttgtgaatcggttttaacagcgtggcgcacagcgccggggtgaggatcatcgccaccagcaccgacagcaccattgctgaaacgatggtgatggagaactggcggtaaatggcgccggtggtgccgccgaagaaggccatgggcacgaataccgccgaaagcaccatggcgataccgaccagcgcgccctggatctgcttcatcgattttcgcgtcgcctcgcgcggcgagaggccttcctcgctcataatgcgctcgacgttttcgacgacgacgatagcatcatcgaccagcaggccgatagccagcaccgtcgcgaacatcgtcagggtgttaatactgtagccgcaggtgtagagcacggcgaaggtgcccatcaataccaccggcacggcgatggtcgggatcagggtcgcgcggaagttctgcaagaacaaatacatgaccaggaacaccagcaggatcgcctccagcagcgtttttaccacatcggtaatcgaggcttttacaaaagaggtggtctcgtaggcgactttatactgcagtccgtgcgggaaatattgcgacagttcatcaagacgggcgataacgcgctcggcggtggccatttcgttggcgccggaggcgagcttaatccccagccccgaagcggcctgacgattatagcggctcagataatcatatttttctgcgcccatttcgacgctggcgacatcgcccagcgtgacttccgaaccatcctgattcacgcgcagggtaatatcgcggaactgctgcggcgtttgcagcagcgattgtgagttgatggtggcgttcagcgcctgcttatcaaccgatggcgtaccgcccaactggccgacggcaatctgcgcgttctgcgattcgatggcgtcagtcacatctttcgccgtcatctgatagctgttgagtttcgccggatcgagccagatacgcattgagtactgcgaaccgtaggcgtcgatatcgccgacgccgttgacgcggcttagtggatcctgcacgttactggcgacgtagtcggcaatatcctgcttatccatgctgccgtcggtagagacaaacgcaagagtgagaatgttggtgtcgccggttttgcgcaccgtgacccctgattctgtaccgcctgcggcagtttacgcatcgccgattgcagctggttttgtacctgctgcacggcctcatccgggtcggtaccggcggtaaagctcagggtaaccgttgcctgaccggtggcgctactctgcgatgacatatacatgaggttatcaaggccggtcatattctgttcgataacctgggtgacggtattctccagcgtttgcgccgaggcgccgggataattcgccgtcactcggacgtttggcggggccagatccggatattgttctacgggaagcgacaaaattgccagtgtgccggtcaggactaataaaatagccaaaacccaggcaaagatggggcgatcgataaagaaattcgccatcggaatcaggacctcattgtgtacattttttgttattgcgcagcctgtgatactttatagataaccccgcaggcaatcgtggagaaattaaggagatagtgtaatttatcatgtgtcttttatgagagcgtaaagaaacctatgccgctcctctccgaatttatatgctcatttcacgccatttctgtcattgactaaaagccgcttattattgctcagctaaatgaaacaaaatttcattcaggtcaatatttttgatctaaaccgggttctggcgagaaaagccgatttctgggcaaatgaccattgtccctcggtcatgatgtcgggtaataaactgtcatactaaatgaggggttattagcgataagccggaaggatgtatgaaccattttattatgagcgatagtcgcaaatgcatcggatgcaggggctgcgaagtggcctgcgtgatggcgcataatggcgagcaacatgtattgaccccacagcgctttttgccgcgtattaccgttattaaaaaccagaaccagcgtaacgcggtaacctgtcgtcactgtgaaggcgcgccctgcgcgcgtagctgcccaaacggcgccattagccagcaggatgacagcatactggtgcatgaagaaaagtgtattggctgtaaatcctgcgtggtggcctgtccctttggcgtgatgcaaatcgtcgtcacgtcaggcggcagagcaacggcgcacaagtgcgacttatgccatgagcgcgaagcggggccggcctgcgtgcaaaattgtccagcgcaggcgttacagctggcgactgattccgctttaagcgagatggcgaaagcgcgtcggctgcgggcggcgcgtgcggatgcggcgtcgtggcaacatcgtgcgatcacggcagacgcgccgactaccggcaataaagccagccagatggcggccacgcccgcgcgcggcgaggcggataaactggcggctgatgcgcgtaaacagcactttggcgaaatctatttgcccttcagcgccgaacaggcgcggcgggaaacgcaacgctgtctgaaatgcggcgatcgcagcatctgcgagtggacctgtccgctgcataaccatattccgcagtggatcgagcgggtaaaagccggcgatatcgccagcgccgttgagctttcccatcaaaccaactgcctgccggaaatcaccggtcgcgtctgcccgcaggatcgtctgtgcgagggggcctgcacgctgcgtgatgagagcggttcggtgactatcggcaacattgaacgctatatctccgaccaggcgctggctggcggctggcgcccggacctttcggcggtaaaagccagcggcaagaaggtagccatcatcggcgccgggcctgcgggcctggcctgcgccgaccttctggcgcgaagcggcgtggcgccggtggtgttcgatcgccacccggaaatcggcggtctgctgactttcggcattccgcctttcaagctggataaatcattgctggcccgtcggcgcgagattttcagccagatgggcatccgctttgaactgaactgcgaggtgggaaaagacatcaaactcgctcaactgcttgcagactatgacgcggttttcgtcggcgccggtacctatcgctcgatgaaagccgatctgcccaacgaggaggcgccgggcgtgtatgaggcgctgccgttccttatcgccaacactaaacaagtgatggggctggaagcgctggccgatgaaccttatatcgatactgccgggctgaatgttgtcgtgctggggggcggcgatacggcgatggactgcgtacgtaccgcgctgcgccacggcgcgcaacaggtcacctgcgcctatcgtcgtgatgaagctaacatgccgggtcgaaaaaagaggtcaaaaatgcccgggaagagggggcgaattttgaattcaatgttcagccgatcacccttgagctcggcgaggacggccgggtcagcggcgtgcgttttctgcgcacccagcttggcgaaccggacgctcagggccgccgcagcccgtcgccgatcccgggcagcgaatttgtgatgcctgccgacgcggtcattatggcgtttggtttccacccgcattcgatgccgtggctggaagccgcaggggtacagctggatagccgcgggcggatcaaggcgaacgtggagagccgctatcgttaccagaccagtaatcagaagatctttgccggcggcgacgcggtgcgcggcgcggatttggtggtgacggcgatggcggaagggcggcatgccgcgcaggggatcatggactaccttggcgtcgctttcgcactgacgcactaacgacaaagcaggctccgcggcgtagtatgactgggttatttcacgctgcggagtttgcatgtcacttaatatccacgtcattaaagataaaattctctccgaaaactactttctgctgcgcaatatgacctatgagttgacgcgccgcgacggcagcgtcgtgcgtcacaaacgcgaagtgtacgatcgcggcaacggcgccacggttctgctatacaaccccaacaagcagagtgtggtactggtgcgtcagttccgcgtcgccacctgggttaacggcaacccggatggcatgctgattgaaacctgcgccggactgctggataacgacgcgccagaggtatgtatccgcaaggaggcgattgaggagacaggctatgaggtcggcgaggcgcgcaaggtcttcgaactctatatgtcgcccggcggcgtgaccgaactgattcacttttttatcgccgaatacagcgaagcgcagcgcgctaaccggggcggcggcgtggatgatgaagatattgaggtgctggaactgccgttcgtccgggcgctggagatggtcgccagcggtgaaattcaggatggcaaagcggtgatcctgctgcaatacctacaaaattccggcctgatgtcgcgggatctctgataaatctgattgagcaaaacccgccagtgctgatgataatgatgaattagaaatcactgtgtcagtcatacttcgggattgtgccgctcatgttttatcgggttttaatgttgctttttttcggttttctgccgacgtcgttggcgtgggcggcgccagcccagcagttgtttggcgactggcttgtcacctgcaacaatcaaaattattgcgtcacgcgtaatgtcgggctacatcatggattggtgatgacgttaagccgcagcgcgggggcggccaccgatgccgctttacgcatcgaacttggcggcgtcggtaatccggttgccgcgctggcggccatcggcccgcggctgcagctagatggaaaaccgctgcattttgacggtaaacattggcagattgccgataagctgattaaaaccggtgatagcgtcagtatcgacgctttcctgcagcaggcccaggaggggaaagagattaccctgcaaaacggtctgcaaagcatttcattgaagggcctgaaggccgcgctgctatttattgataatcggcaaaagcgggtcggcagcgaaaccgcgtgggtcggcaaaggtgaagaaccaccgctcagcgtaccgccagcgccggcgttgcgaaccgtaggcaaagcggaggtggcgcagtcgcccctcagccgcgacgaacttaatgaacttatcgattacggcaatgagcggatgaacgccagcccctgttcgctcgatcctttccgccgggaaatccgcgtcaccgcgctgaccgatgagaaagtgctgctgatgaccagttgcgaagcgggcgcctacaacaccgtctggctggcgtggctggtgtcgcgcaaaacgccgcatcttgcccgccaggtgcggctggcgttacctttccagccgcccggcaatgcgccgcgcgatattgagttgattaacgccagctttgacgagcagcgtcatgaactggtgaccttcgataaaggccgcgcgccgggcgattgcgggatccaaacccgctggcgttatgacggccagcggtttaatttaacccgctacgctcagcaaccgcagtgcgataactggcaggggccagacgcctggcccacactatggatcacccgttaagcactttgcggctgacttcgacaatatgttcagcggtaaagccgaagaacgggaacagcttgtcggcgggcgctgattccccgtagcgggtcataccaacaattgcgcctttcaggccgacatatttataccagtagtcggcgataccggcttcgatagcgacgcgggcgctaacatcagaaggcaacaccgactcgcgccaggcctcatcctgagcatcgaaaacgtcggtggaaggcagcgacaccacccgcacgtttacgccgctggccagcagcgtctccgccgcctgaacggctatctcgacttccgaaccggtggcgatcaggatgagatccggcttgccgcccgcatccttcagaacgtaaccgccgcgagcaatttcctggacctgttccggcgtacgggccatttgcgccagattctgtcgcgaaaggattaacgcggtagggccgtcattgcgctcgatggccgcctgccaggcgacggcggtttccacctgatcgcacggacgccaggtactgaaattgggcgtcaggcgcaggcttgccagttgctccaccgcctggtgcgttgggccgtcttcgccaaggccgattgaatcatgggtatagaccataatctggtgcgccttcatcagcgccgccatgcgtgcggcgttgcgtgcgtattcgacgaacatcaggaaggtcgaggtatagggaataaaaccgccgtgcagggcgataccgttggctaccgcggtcataccgaattcgcgtacgccgtagtggatataattacccgcctgatcctctttgatcgacttcgagccggaccagatcgtcaggttactgggcgccaggtcggcggaaccaccgagcagctcaggcaaatccgggccgtaggcgttaagcgcattttgcgaagccttacggctggcgatcttcgccggttccgactgtagcttcgccacataatcgcgggctgtattttgccagttagccgggagctcaccttccatgcggcgttttagttcagccgccagttctggatattgctgctggtaagcggcgaatttttcattccacgtatgttctgctttctcgccgcgcggccgcgcatcccagccctgataaatttctttcgggatttcaaacggcggatatttccagcccagctgttcgcgggccagcgcgacctctttttcccccaatgccgcgccgtgcgactcttcggaaccggctttatttggtgaaccaaagccgattatggtgcggcaaataatcagcgagggtttgtctgttaccgcctgcgcttcctggattgcctgcttcaccgcctgtgggtcgtgaccgtctatatcgccaatcacgtgccagtggtaggcgcgaaagcgctcggcggtatcgtcggtgaaccagccttcaacgtggccgtcaatagagataccgttgtgatcgtagaacccgatcagcttgcctaaccccagggtgcctgccagcgaactggcctcgtgtgaaatcccctccatcagacagccatcgcccataaacacccaagtatagtgatcgacaatgtcgtggccgggacggttaaactgcgccgccagcgtacgttcggcgatagccatcccgacggcgttagccagcccttggccgagcggcccggtggtggtttccacgccgggggtatagccatgttccgggtggcccggcgttttcgaatgcaactggcggaagtttttcagctcattcatcggcagatcgtagccggtcaaatgcagcaggctatacagcagcatcgaagcatggccgttagacaaaatgaaacgatcgcgatcgtaccagtgcgggtttgccgggttgtgtttgagaaaatcgttccacagcacttcggcgatatccgccatccccatcggagcgccggggtggccggaattggctttctggacggcgtccatgctcagggcgcgaatggcgttagcaagctctcttcgggacatagtcgtttactccgtgacaaaggatgacagttttgctgctagcagatcttccagtttgcgttgatcgacggcgaactggcgaataccttccgccagcttttctaccgccatcggatcctggttatgctcccagcggaattccgcttcgcttagcggaaccgggcgcggaagtatctgatgagcggggatgagtttacgtattaccggcgcgtcgctggcctgcagctcttgcaacaaggccggggagatggtgaggcggtcgcagccgaccagcgcaaggatttgttcggtacggcggaagctggcgcccatcacgatggtgttgtacttatggagtttgaaatagtcgtagatattgcgcaccgatttcacccccgggtcttcatcaaccacgtaaggatctaacggctgacgcgcctgataccagtcgtaaatacgcccgacgaagggtgaaatcagaaacacgccggcttcggcgcaagcgcgagcctgggcgaaagagaacaacagcgtcaggttgcagtgaatcccttctttttccagcacctccgcggcgcggatcccttcccaggtggaggctagtttgatcaggatccgcgacttatcgatccccatttcctgatagagagcgaccagatggcgcgctttctcgatacttttttcacgattgaaggagagacgggcatcgacttcggtggagacgcgccctgggatgcttttgagtatttccgcaccaaaattgaccgccagtttatcgcaggcattggcgacctgcgtctcgcggttgccgccctgttttgcagcccaggcgagggcatcatcgataagcccggcatagttatccagtccggcagcctttaagagcagcgaagggttggtggtggcatcttcaggctgatagtggcggatagattcaatgtcgccgctgtcggcgactacggtggtgaattgtttgatactgtctagctggttcattaaaaagtactcctggaacaataagttgcatgagttcttgtcgttatgcggtagaggtcgtgatgaggtacataactaaaaagcatagcagacggggctatcattgaccgtgaaactaggttacataaatattataaattgataacaaccagacctttgtgatggcaagagtatggcggccttcaaagtttaaaccgccgtcaggcgcgatactaagcctcgccttaaggcgggccgacggctcgccatcacgcttcaccccctacgattcgatacgtgaaaggaaccataaaatggatgagcagttgaaacaaagcgccctcgatttccacgagttcccggtgcccgggaaaattcaggtgtcgccgaccaagcccctggcgacccaacgcgatctggcgctggcatattcgccgggcgttgccgcgccgtgcctggaaattgagaaggatcctttggccgcttacaaatacaccgctcgcggcaaccttgtcgcggtggtctccaacggtaccgccgtcctcggtttaggcaatatcggcgcgctggccggaaaaccggtaatggaaggaaagggcgttctgtttaaaaagtttgccggtattgatgtgttcgatattgaagttgatgagctggatcctgacaaattcattaatgtcgttgccgccctggagccgacgtttggcggcatcaacctcgaagatattaaagcgccggaatgtttctatattgagcaaaaactgcgtgaacgcatgaatattccggtgttccatgacgatcagcacggcacggcgattatcagcactgcggcaattctcaacggtctgcgggtggtcgagaagaatctctccgatgtgcggatggtggtctccggcgcgggagcggcggcaatcgcctgtatgaacctgctggtggcgctgggaatgcagaaacacaatatcgtggtctgcgactcgaaaggcgttatctataaagaccgtgaagccaacatggcggaaaccaaagcggcctacgcggtggaagacgacgggaaacgtaccctcgacgatgtcattgatggcgcggacattttcctcggctgctccgggccgaaagttctgaccccggagatggtcaagaaaatggcgcgctcgccgctgatcctcgcgctggcgaacccggagccggaaatcctgccgccgctggcgaaggaagtgcgcgacgacgtgattatttgtaccggccgttccgactatccaaaccaggtcaacaacgtgctgtgcttcccgttcatcttccgcggcgcgctggatgttggcgcgacggcgataaacgaagagatgaagctggcggcggttcacgctatcgccgagctggcgcatgccgaacagagcgaagtcgtggcttccgcctatggcgaccaggatctcagctttggcccggagtacattattccgaaaccgttcgatccgcgtctgatcgtcaagatcgccccagcggtcgctaaagcggcgatggaatccggcgtggcgacgcggccaattgccgacttcgatgcctacatcgagaagctgagcgagttcgtttataaaactaacctgtttatgaagccgatcttctcccaggcgcgcaaagagccgaagcgcgtggtgctggcggaaggtgaggagactcgcgtgctgcacgccacgcaggagctggtttctctgggctggcgaagccaatcctcatcggtcgcccgagcgtgattgaaatgcgcatccagaaactgggcctgcagattaaagcgggcgtggacttcgaaatcgtcaataatgaatccgatccgcgcttcaaagagtactggagcgagtactaccagttgatgaagcgccgcggcattacccaggagcaggcgcagcgggcggtcattagcaacacttcggtcattggcgcgattatggttcatcgcggtgaggcggatgcgatgatctgcggaaccatcggcgattatcatgagcactatcgcgtggtgcagccgctgtttggcttccgcgacggcgtcagcaccgccggggcgatgaacgcgctgctgctgccaagcggaaacacctttatcgccgatacctatgtcaaccacgatccatcgccggaagagctggcggagatcaccctgatggcggcggaaagcgtgcgtcgttttggtatcgaaccgcgtgtggcgctgctgtcgcactctaacttcggttcagctgattgcccgtctgccagcaaaatgcgcaaaacgctggaactggtgaaggcgagcgcgccggatctgatgattgacggcgaaatgcacggtgatgccgcgctggtggagagtatccgcaacgatcgcatgccggatagcccgctgaaaggggcggccaatattctggtgatgccgaatatggaagccgcgcgtatcagctacaacctgctgcgcgtttccagctcggaaggggtaaccgtcggaccggtactgatgggtatcgctaagccggtgcatattctgacgcctatcgcctccgtacgccgtatcgtcaatatggtggcgctggcagtcgtggaagcgcagacccagccgctgtaaacgcaaaaaattaagccccggtattccggggcttttttgtctcaggtggctcaattcagatccactctttcactttgataaactcgctcagtgcggcttccgggctgccttcctgcgggtggtagtcatactcccagcgcaccagcggcggcatcgacatcagaatagactccgtacgcccgccggtctgcaggccgaacagcgtgccgcgatcccacaccagattgaattccacatagcgcccgcggcgataaagctggaaatcgcgttcgcgttcgccataaggcgtggtttttcggcgctcaacgatcggcaggtaagcgtcggtaaagccgttgcctaccgcctgcataaaggcgaagcagtggtcgaagcccggggtatttaaatcatcaaagaacaggccgccaatgccgcgctgctcattgcggtgcttaaggaagaagtaatcatcgcaccactttttatagcgcggatagacctcgtcgccgtacggcaggcataagtcgcgggcggtacgatgccagtgaatagcgtcttcttcaaacccgtaataaggcgttagatcaaacccgccgccgaaccaccacactgggtcggcgccgggcttctcggcaatgaaaaagcgaacgttagcgtggctggtcggcacataggggttgcgcggatgcaccaccagcgaaacccccattgcttcaaagctgcgccctgccagttccgggcggtgggcggtagccgaagcgggcatcgcatcgccgtggacgtgagaaaaattaaccccggcctgctcaaagatgccgccgtcacgtaaaacccggctgcgtccgccgccgccgccttcgcgctgccagctatcttcaacaaaatccttgccgtcaacggcggagagtttggcgcaaatggcatcctgcagctgaagaaggaaggcttttacctgctgtacatcgggtttcattaacgtctcttcgaatgcgctttctggttatcgaaccagtggaaataactaataatgccggaagcgatagcgttagcaatcttttggcgaaacgcggttgtaccgagtagcttctcttcatttgggttggtaatgaacgacgtttcgaccagcaccgagggaatcgaaggggacttcagcaccacaaaggccgcctgctcagtattgcggctgtgcagcttatgcaccggcttaatctttttcagaatatgtgagccgagcgtcaggctgttcttaatggtgtcggtttgcaccaaatcgaacaatacctgctgcagcagatggtccttatccgtcgcttttttaccggcgacctcatcggcgcggttttcgcgctcggagagatatttcgccatggcgctactggcgccgcggttggagagcgcaaagacggaggcgccggccgcactcgggttggtaaagccgtcagcgtgaatcgacataaacagatcggcgccgtgctggtgggcaatctcaacgcgatcgtacagcggaataaaggtatcgccgctacgcgtcagacgagcatcgatgccgttgctgcgtaaaatgctgcgaacatttttagcaatggccagtacgacgtgtttttctttcgaaccgttgtggccaattgcccccgtatcgatgccgccatgaccggggtcaagcatcaccaggcgcttgctgcccgctttctttgcgacgggtttgctgtgtccattggaagttttaagcggctgttctttggctgcggcttgggaagcgacgccggttagcgtcatcgcagccagtcctgctttcagcacctgacggcgcgaagcaagtatttttaatggtttaaaagtgctcattcggcctgaattgtaaacaagtgatgtccaatgttatatcgtatcgcgtttcccgttacgaccactcaaaataagaattgttttacttttcatttcaatacatgacaaagatatattatgccattttttgctgatgatttcgcctgatattggctatcagtcatattcgcgccataatcactgtttttaaccgtaaatggtggggaataccatggagattcgcgtttttcgccagcaggacttcgaagaagtgatcaccctttgggagcgctgcgatcttctgcgcccatggaacgatccggaaatggatatcgagcgtaagctcaaccacgacgtgagcctgtttctggtcgcggaagtgaacggtgaagtggtcgggacggtgatgggcggttacgacggccaccgcggttccgcttactatcttggcgtacatccggaataccgcggccgcggtatcgctaatgcgctgctcaatcggctggaaaagaaactgattgcccgcggttgcccgaaaatttcaattatggtgcgtgacgataacgacgtggtgcaggggatgtacgagcgtctcggttacgagcactcggatgtactcaccctgggtaagcgcctgattgaagatgaagaatactgaatttattcctgccgattatgatacccagggccgtttacggctgccgctgttgttttggggcgtgctgttgctgcaggcgcgcacctgggtgctgttcgtcatggccggtgcctcccgccagcagggggatgcgctgctgaacctgttctatcccgatcacgataacttctggctgggtctactgcccggcgtaccggcggtcgcggcatttttgttgagcggtcagcgtcagcgttttccccgggtctggccgctgatgcgttggctgctgattgcctcgcaggcgctattgttggcctggcagccgtggctgtggttaaacggcgaggcgccttccacgctgactatcgccctgctggcggccgatatttacgccctatggtggctgatatccagccgcaggttgcacgcctgttttcgccttgaagcgctttaatggcactttttgccgatcgtgtactccaacatgcgttgaattaatcagaaaggattgagttatgaaatcgctacgtctaatgctatgcgcgcttccgctggcgctaaccggctgctcaacgatgagcgcggtgaactggtcggctgcctatccatggaactggtttggttcctccaacgaggtcaccgagcagggcgtgggtaaactgacggcatcgacgccgctgaatgaacaggcgattagcgatgctctcggcggcagctaccgtctgcgcagcggaatgaaaaccacggatggcaaaatcgttcactattttgaagcgctaaaggatgacaagctggcgctgaccataaacggcgatggcggtacggtgagccgcattgacgtgcgcgatagcgcgatctccgccgccagcggcgtgaaaatcggtaccccgtttagcgagctgtacagcaaagcgttcggcaactgcgagaaaagcgcacctgataacggtgcggtggtggaatgtaaagccgcaggtagccagcacatcagctacgcctttaccggtcactggagcggcccggacgagctgatgccgtccgacgataccctgaagaactggaaagtcagcaaaattatctggcgtcgctaatttgatctgaagagacacgtgggtggctaaaaacggttacaatggcgcgttagcaacgtcatagcgttgcggttgcatcatttcaggaggagcgatgtctcaggttcagagcggcattttgccggaacattgccgcgcggcgatttggattgaagccaatgtaaaaggggacgttaacgccctgcgcgaagcgagcaaaatttttgtcgataaagtggccaccttccaggctaaattccctgacgccaaactcggcgcggtggtcgctttcggcaataccgtctggcgtcagctgagcggtggtgaaggcgcggaagagttaaaagattttccggtttacggcaaagggctggcgccatccacgcagtatgacgtgttgattcatattttatccgcccgtcatgaagtgaacttttccgtcgcccaggcggcggtggccgctttcggcgacgccatcgaagtgaaagaagaaattcacggtttccgctgggtggaagaacgcgatctgagcggcttcgtcgacggcaccgaaaacccggcaggcgaggaaacccgccgtgaagtcgcggtgattaaagacggcgttgacgcgggcggcagctacgtattcgtgcaacgctgggagcacaatcttaagcaactgaaccgcatgagcgtgccggatcaggagatgatgattggccgtactaaagaagccaatgaagagatcgatggcgacgagcgtccggtcacttcgcacctgagccgcgtggatctaaaagaagatggcaaagggctgaaaattgtccgccagagcctgccatacggtaccgccagcggcaccaacggcctgtacttctgcgcctattgcgctcgcctgtataacattgagcagcagctgctgagtatgttcggcgataccgacggtaagcgtgatgccatgctgcgcttcactaaaccggtgaccggcggttattacttcgcgccgtcgctggagcgtattcaggcgctgtaatttttcccctcaccctaaccctctccctaaaggggagaggggacggtacggtggactctctttctccctctccctcagggagaggggcggggtgagggcatcggcgactcaagcacttcaagtattctctccatcaccgcatcttcatactcttcaaactcattattccagaagcgtaaaacccgccatccctggctctgtagccagcggcgaacatcgtagacgttctgttggcgttaagctacgtctgagctgacgagcaaatatctgtgtgtttttcatataaacacagtgcacgcctggctgccgtttgtcacaatgacacgtccaatctgcgagccgctttcagcaaagctttgccagttgcttattctcttttctacttccaaatcgccaaacggtatataaaaccgttactcctttcgtactcgttataaatatgatgatcatcagtaaatgatcattttagataagggtgcgcaatggccgttaaatcactgaaaaaaggatatctggcgctggcggcttccatgctgctggtggcgcaggcgcaggcgactgaactgctgaacagttcctatgatgtttcccgcgagctgttcgccgcccttaatccgccttttgaacagcagtgggcaaaagaaaacggcggcgacaagctgaccattaagcagtcccatgcgggctcctccaagcaggcgttggcgatcctgcaaggtctgaaggctgacgtcgtgacctataaccaggtgacggacgtccagattttacatgataaaggcaacctgatcccggcagactggcagagccgtctgccgaataacagctcgccgttttattcgaccatggctttcctggtgcgtaagggcaacccaaaaaatattcacgactggaacgatctggtgcgttctgacgtgaagctgatcttcccgaatcctaaaacttcaggcaacgcgcgctatacctatcttgcggcctgggggcggcggacaaagccgatggcggcgataaagccaaaaccgaacagttcatgacccagttcctgaagaatgtcgaggtattcgataccggcggtcgcggcgcgaccaccaccttcgtcgagcgcgggttgggcgatgtgctgattacttttgaatcggaagttaacaacatccgtaaacagtatgaagcgcaggggttcgaagtcgttgtgccgaaggtcaatatcctcgccgaattcccggtagcgtgggtagacaaaaacgttaaggccaacggtactgaaaaagcggcgaaagcctacctgaactatctctatagtccgcaggcgcagaccatcatcaccgattactactatcgcgtgaacgatccgaaagtcatggcgtcgctgaaagataaattcccgcagaccgaactgttccgcgtggaagaccagtttggcagctggcctgaagtgatgaaaacccacttcgtcagcggcggcgagctggacaaactgctggcagcggggcgtcagtaatgttggctgtgtcgtccaagcgcgtgctgccgggctttaccctgagccttggcaccagcctgctgtttgtgtgcctgattttactgttgccgctcagcgcgctggtgatgcagctggcgcagatgagctgggcgcagtattgggaggtgattaccaacccgcaggtggtggctgcctataaagtcacgctgctgtcggccttcgtggcctcgatttttaacggcgtgttcggcttgctgatggcgtggattcttacacgttatcgttttccgggccgtacgctgctcgatgccctaatggacctgccgttcgcgctgccgacggcagtggcgggcctgacgctggcctcgctgttttcggtcaatggcttatacggcgagtggctggcgaagtttgatatcaaagtgacctatacctggcttggcatcgcggtggcgatggcctttaccagcatcccgtttgtggtgcgtaccgtgcagccggtgctggaagagttagggccggaatatgaagaggcggcggaaaccctcggtgcgacgcgcttacagagcttccgcaaagtggtgttgcctgaactgtcgccagccctgctggcggggattgcgctgtcgtttacccgcagtctcggcgagttcggcgcggtaatttttattgccggtaatatcgcatggaaaacggaagtgacttcgctgatgattttcattcgtttgcaggagtttgattacccggcggcgagcgcgattgcctcggtgatcctcgcggcttcgctgctgctgctgttctctatcaacaccctgcagagtcgctttggtcgacgcgtggtaggtcactaatggcggaagttactcaattgaagcgctatgacgcgccccggatcaactggggcaaatggtttctgattggcgtcgggatgctggtgtccgccttcatccttgtggtgccaatggcttatatttttatccaggcattcagccaggggctaatgccggtgctggaaaatctggccaacccggacatgctgcacgccatctggctgacggtgatgatcgcgttgattaccgtgccggtgaatctggtgttcggtaccttacttgcctggctggtgacgcgctttaccttcccaggccgccagctgctgctgacgatgctggatatcccgttcgccgtctcgccggtggtggcaggtctggtttatttactgttttacggctccaacggcccactcggcggctggcttgatgagcacaacctgcagatcatgttcgcctggccgggcatggtactggcgactatcttcgtcacctgcccgtttgtagtccgcgagctggtgccggtgatgatgagccagggaagcaacgaagatgaagcggcgatcctgctcggcgcttccggttggcagatgttccgccgggtgacgctacccaatattcgctgggcgctgctgtacggcgtggtgttaaccaacgcccgcgcgattggcgaattcggcgcggtgtcggtcgtttccggctcgatccgcggcgaaacgctgtcgctgccgctgcaaattgaattactgcagcaggactacaacaccgtcggttcgtttaccgctgcagctctgctgacgttaatggctattttgaccctgtttttaaagagtatgttgcaatggcgtctggccaatcaggaaaaacgcgcgcaacaggagggaaatcatgagcattgagattgccaatattaagaaatcgtttggtcgcacccaggtgctgaatgatatctcgctggatatcccttccgggcaaatggttgcgctgctggggccgtccggctctggtaaaaccaccttattgcggattatcgccgggctggaacatcaatccagcggccatatccgttttcacggtaccgacgtgagccggatgcacgcccgcgatcgtaaagtaggctttgttttccagcactacgcgttgtttcggcatatgacggtattcgataacatcgcctttggcctgaccgtgctgccgcgccgtgagcgtcccaatgcggcggcgattaaagccaaagtgaccaaactgctggagatggtgcaactggcccatttggccgaccgttatccggcgcagctttccggcggccagaagcaacgcgtggcgttagcgcgcgcgctggcggtcgagccgcaaattctgctgctggatgaaccctttggcgcgctggatgcgcaggtgcgtaaagaactgcgccgctggttgcgccagctgcatgaagaattaaaattcaccagcgtgtttgttacccacgaccaggaagaggcgatggaagtcgccgatcgggtagtggtaatgagccagggcaacatcgaacaggccgatgcgcctgaacgcgtctggcgtgaaccttcgacccgttttgtgctcgagtttatgggcgaagttaaccgcctgcagggaaccattcgcggcggccagttccacgtcggcgcccatcgctggcctttaggctataccccggcataccaggggccggtcgatctgttcctgcgaccgtgggaagtagatatcagccgccgtaccagcctggattctccgttgccggtacaggtgctggaagccagtcctaaagggcactacacccaattagttgtccagcctctggggtggtatgacgaaccgctgagtgtggtgctggcgggcgatgaggccccgtcccgcggcgaacgcctgtttgtcggcttgcagaatgcgcgcctgtataacggaaccgagcgcatcgaaccgcgcggcgaacttgctctggcagagtcggcctgatagcttaaatccacgtgcttttgccgggcggcgcagcgctgccccggctgatagcccggagcgcatgacgcggccgggctttttattggacagctgaagtgaacacattagaacaaacaatcggcaacacgccgctggtgaaattacaacgtctggcgccggacaacggcagcgaaatttggctcaaactcgagggtaacaacccggcgggctcggtaaaagatcgcgccgcgctgtcgatgattgtcgaagcggaaaagcgcggcgaaattaaaccgggcgacgtgcttattgaggcgaccagcggtaataccggtatcgcgctggcgatgattgcggcgttaaaaggctatcagatgaaactgctgatgccggacaacatgagccaggagcgccgtgccgcgatgcgcgcctacggcgctgaattgattctggtcaccaaagagcaggggatggagggcgctcgcgatctggccgcagcgatggccgagcgtggcgagggtaagctattggatcagttcaataatccggataacccttacgcccattacaccaccaccggcccggagatctggcgccagacggacgggcgtatcacccactttgtttccagcatgggcaccaccggtaccattactggcgtatcgcgttttctgcgcgaacaggcgaagccggtaagcatcattgggctgcagccggaagagggcagcagcattccggggatccgtcgttggccgcaggaatatatgccgggcatttttaatgcctcgttggtggatgaggtgctggatatccaccagcaggatgcggaaaacacgatgcgccagttggccgtacaggaagggatcttctgtggcgtcagttccggcggcgcggttgccggggcgctgcgtattgctcgcgccaatccgggcgcggtggtggtggcgatcatctgcgatcgcggcgatcgctatctctcaaccggcgtgttcggcgaagaacacttcagccagggggcgggtatctaaacgcgctatcactgccccatgtcaggcatgggggccggttaacttaaagtgcgtatttcgctaccagcttatccagaaacgcccatagcttttgattcatctcgcgataatcccattgcctcatttcatcttcactgcgaataaagcgcctgccttttgcggcggcaagttcatgttgcgagtgcgtaattaataacccgatgacctccgcgtcaaactccatatggcactgaaaaccgtagacccgatcgctatatttgacgatttgccgcgggcacccttcactggaagccaggacttccgccgcaggcgtcaggcccggcatatcgttgtgccagtgaccgactaccaccgatgagccgaaatgggcgatgttgtcatcctgcagtccggcggtggtcaggatgataggatagtggccaatctctttttccgggctttgcatcaccggcgcccccagcgcttcgccgatgagctgcgatccgagacaaatcccgaccacgatacgcccggcggcaatcgcctgggcaatcaggtttttctcggcatgggcatcaaaccatgggcactcggcaagcgtagtgcgtggtgattgcgggccgccaagtaccaccagcatatcaaaaccttcggcattcgccggcagcggatcccctgcataaactcgcgaccaactggcctgatagccgcgcgcgttaacccagcgcagataggcgccaggcgcttcaaaaacttcatggacgataaagaggatccgcataacaactcccgtgtttaacaaggtaataccagcgataaatcgtgtgcaagttgttcaatttgcgcctcggttaaggcgcccagcgacaggcgcaggccgtgcgccggtgttttcacgccaaaggcttcaccttcacgcactagccaaccggcccgcgccagacgcaatgccagcggctggctggcggctgatagcggcagccagaaattaagaccatcgccaggcggataatcgccagcgccgcggtaggccaatgcggcggcgagccgctgattttgctgctgataatggcgctggctcgcagtcagagaagcggcaaaagcgctatcattcaggcaggcgaacaccagctcctgcagtaaatggctgacccactggctaccggcgttcaggcgcaggcgcagcgccgccgaggttgtaggatcgctggcaactatcgccagccgcaaatccgggcccagggttttggacattgagcgcaccagcgcccaacgctgaatgccttcaggtagcggattgtgccagcatgtcgcagagagcagggcgaagtgatcgtcaacaatcgccagcgtctgcggatagcgagcgagcacggagcggatcgcttgtgcgcgctcgggcgtcaaactgcagccggtcgggttgtgggcgcgtggggtcagtattaccgcgcgggcgccgttgcgcagcgcttcttcaagccgctccgggtccatgccttcaccgtcgacggcgacagggctgggctggaaaccggcgtaacgcagcatattaatgctgctcagaaagcaggggtcttctaccgcgacgctgtcgccgggtagcagcagcgcgcagagcagtcgttccagggcgtcaatcgcgccgctggtcaagttgatgtcaaattcctggccgatatcgcgactgacccactcccgcgcccagtcagccagccgtggctcaacggcggcatcgccatataagtgcggggtctgcgccagctgcggaagaaaacggccaatatccggcagacatcgtggatccggattgccgccggaaatatcaatcagcgatgtcgtcggatcgccaccctcgaccgcatcaagcgtattgagcgccttaatggccgtgccgttgcgcccttgactgacggcgagcccagaagtcaccagccgcttgtaggcagccgccaccgtattgcggttgactgccagttcgcctgccagttcgcgcaccggaggcagcgcctcgccgggttgcaacgcgccgctctgcaccagatgacggatgttatcgaaaatctcgcttgcggtttttccggtgaacattattgacctatgacaaaatgaattttagcataggacgaatgataatcagagtatgacccgctgtccagcgggggagaaaggatgagtcagcaagacgaaatacagtccgtgctctttaacgaccacagccgggcgctggaggttgatattgtggcggtgcaatcgcaggtggtatatggcagcgtcggcaacagtattgcggtaccggcaatcaagcagcatgaattgcgggtgatggcggtgccgacggtgttattcagtaatactccacattacgatactttctacggtggagtgattccggaagagtggtttagcggttatctgcgggcgctggaggagcgtgatgcgcttcgcgagctgcgggcggtaaccaccggttatatgggcagcgccgggcaaattgcgctgctggcgcagtggctgcagcggatccgtgtgcaccaccccgatctctgtattctggttgacccggtgattggcgacgtggatagcggcatttacgtaaaagcggagatccccgaggcttatcgccgccacctgttgccgctggcgcagggtatcacgccaaatctgttcgagctcgaaaccctcagcggcataccgtgccacaaccagcaggaagcggtggtcgccgcgcgaagtctgctttccgatacgctaaagtgggtggtgattaccagcgcgcctggaccggatacttcgactattaacgtgctggtggtcaccgacgacgcggtcgaagtggtcgtccatcctcgcgtcgaaactgacctcaaaggcaccggcgatctgttctgcgccgagctaatcagcaacctggtacgcgacatgccgttgggcgacgctacgcgcgccgccgctcagcgcgtgctggcggtaatgacctggaccgagagtcagggctgcgatgaactcattttaccgccgtctggagcgcaataacgatgcatagctatcggttagtggtacgcagggagggaagaactgtcggccatttcgaaactacggggatgaacgcgctggaagatgcctgtagggcgaggtcgttgtttgaaagcgatcctggctaccagtgcgagctatgggtcgcggatagcgaacggcggattctggaaagtagcccgcaggggatgaaaatcctggcgagtgaaaagtgttatcggccagcataaaaaaatggcgccttcaggcgccattttctcggcaagcaagaattacttcttgatgcggataaccggagtttcaccaacggtgacgctaccggacagtttgatcagctctttgatctcatccatgttggagataacaaccggagtcagagtcgacttggctttttcttccagcagcggcagatcgaattcgataaccgggtcgcctactttcacgcgctgaccttcttcagcgatgcgcttgaagccttcgcctttcagttcaacggtatcgataccgaagtgaacaaacagctcaatgccgctatcggattcaatagagaaagcatggttggtttcaaaaattttaccgatggtaccctctaccggcgcaaccattttgttgccagtaggtttgatggcaatgccatcacccacaattttctccgcaaaaaccacatccggcacgtcttcgatgttgacgatctcgccagagagcggagcaacaatctcaatagttccggtgtcttttttgtcatcagaaaccagagatttcagtttatcgaacaaacccatgatcttctcctaagcagtaatttgggccgcgcatctcgtggattagcagattgttttttcttcaatgaacttgttaaccagcgtcattaactcgtccgtcgtcggttgagcaagagcctgctctgctaatactttcgcatcttcgaagttcgtgttacgaataatcttcttgatgcgcgggatggaaatggcgctcatagagaattcgtccagccccatacccagcaacagaagtgtagcacgttcatcgcccgcaagctcaccacacataccagtccatttgccttctgcatgagaagcatcaataacttgcttgatcagagtcagcacagacggtgacatcggctggtaaagatgcgagatcatatcattaccacggtcaactgccagagtatattgcgttaaatcattggttccgatactaaagaaatcaacttctttggctaaatgacgagcaatggtcgcggctgccggggtttccaccatcacgccgatctcaatcgattcgtcaaaagctttaccttcgtcacgcagttcctgtttgtagatctcaatctctttcttcagtgcgcgcacttcttcaacagagatgatcatcgggaacatgatgcgcagcttaccgaaagcggaggcacgcaggatagcgcgaacctggtcgcggaggatctctttacgatccatcgcgatacgcacggcgcgccagccgaggaacgggttctcttctttcgggaagttcatgtacggcagttctttatcgccgccgatgtccatggtacgaacgataacggcctgtgagccgcacgcttcagccaccgctttatacgctgcgaactgttcttcttcagtcggcagagaatcgcggtccatgaacaggaattcagtacggtacaggcctacgccttccgcgccgttgcgctcagcgccgtctacgtcgcgaacggtaccgatgttagcgcaaacttcaacctgatgaccgtcgagagtgatggccggcagatctttcagtttcgccagttctgctttttcttcagcaacctgcgcctgcagcgcacgcagctcttcaattttatcgttgcttgggttaaccagaacctggttgttaaccgcatcgagaatcagatagtcgccgtttttcacctgggaggtgacgcttccggtaccgacgattgccggcagttcaagggagcgcgccatgatagaggtgtgggaagtacggccgcccgcgtcggtgatgaaacccagcaccttattgaggttcagctgtgcggtttccgacggggtcagatcggcggcaacgaggatgacttcatccgcgatagcgctcagatcgatgattgccaggcccagaatgttgcgcagcagacgtttaccgatgtcgcgtacgtcagcggcacgctctttcaggtattcgtcatccagctcttccagtgcagttgcctgaccttcgataacttcattggctgccgcatcggcagtcatgtgcttatctttaatcagggctatgatttcctgctcaagctcctcatcttccagcagcataatatgcccttcgaagatggcttctttttcttcaccgaaagtttcaccagctttggttttgatgacctccagctgggcggaggccttggtgcggccgttcaggaaacgttcaacttcctgatcaaccttatcggcagaaattttcttccggtcgatgacaatttcatcttctttcagcaggagagccttgccgaaagcgatacccggggatgctaaaatgcctgaaatcataaccctaccttacttgtgactgatattaaaaagaacccgtgaacttactcgagttcagccatcagtttaaccagatgctcaactgctttttgctcatcttcgccttcagcggagatggttacaacggtaccctgagtcaggcccagagtttgcagtttgaacaggctttttgcgctggcgcttttgccgttggaggttacagtgatctcagaagtgaagcctttcgcttctttaacaaactgagcagcagggcgggtgtgcagaccgttcggagcggtaatggtaacttcttgctggaacattatatttccccaacttataggtttagtgttgtggacctaaagtctagcctaacgaccaaactttagcctgtattgttagcgccggcgttacgtgtgtggctaaggcgtcagcagcggaaccgctgagaggaccttaagtccgttgacgtctagcacttcattaaacattatgccgcgaaaggaagacttgaaccaaatcataaaatcgattcagcctgcggaaatccaaatctgaataatttcgcgcttcaaaataaatgtgctggttaaataccagaccctacgaggtgaatcaatgccaggaggggtaaaactttgacgtatgccacaaaaaagcacccgaaaaggtgcttttttacacggtttttacaaactggcactactgttgcaattctttctcggtgaagagatctgcgaacagcgccgtgcttaaataacgctcaccggaagacggtaggataaccacaatgttcttattggtaaaggcctcatcttcctgcagctttaacgccgcggcgacggccgcgccggaagagataccggccagaataccttcttcttccatcaggcgacgagcggtggagatggcttcttcgttggtgatggcgaccactttatcgaccagtttcaggtcgagattgcccgggataaagccggcgccgatgccctgaattttgtgcgggccaggtttcagctcttcgccagccagcgcctgggtgataaccggcgagtcggttggctcaacggcgacggtaatcagatcttttttgcctttcgtgcctttaatataacgagaaacaccggtcagggtaccgccggtaccgacgccggagataaaaacgtcaacctgaccatcggtgtcttcccagatttccgggccggtggtcttttcgtgaatttccgggttcgccggattactgaattgctgcagcagcagatatttttccgggtcgctggcgacaatctcttccgccttctggatggcgcccttcatacctttcgcgccttcagtcagcaccaggttagcgcccagcgctttcagcagcttgcggcgttccacgctcatggtttccggcatggtcagtgtgagtttgtagccgcgagcggcggccacgtaggcgagggcgataccggtgttgccgctggttggttcaaccagttccacacccggtttcagtacgccgcgcttttcagcatcccaaatcatattggcgccgatacggcatttaacgctaaagctcgggttacgagattctaccttggccaagattcggccattaccgatgcggttcagtcgtaccagcggcgtatgaccgattgtcagggagttgtcttcaaaaatcttactcatggcccgtccttaactgtatgaaatttgggggtacggcttcagcatacccgcttaaacaatatccggaagtaaggatttagcatatctatatgctgaagggaaataatgatgagcaagaaggaataagacggaaataaggggcggcgtgaaccgccccgaaagagagagctaagcgcactatttccacatcgcgtgcttatcgcgatagcaatccacccacatcgccgtcgcgccgcagatagcaactggcaaaatcaccaggttgagaaccgggatcatggtgaacaggctggtcagcgcgccaaactgcatgttgatgaccttccgcgaacgcagcgcctcgcgcatggttttaaacggcactttatggttatcgaacggatagtcgcaatactgaatggccagcatccaggcgctaaacaagaaccacagtaccggcgcgacggtttggccaatgccggggataaaatacagcagtaacagaacgatggcgcgcggcaggtaccaggcaaacttttgccattcgcgtttcatgatgcgtgggacatctttcatgatgccgaatatgccaacgtccggcggcgtcgcgccggtcagtcgcgcttcgagctgttccgccagcaggccgctaaacggcgcggcaatccagttggcgatggtcgaaaagaagtaaccaaataccaacaaaatagagataaccgccaccggccacagtaggtagtttaaccactgaagccattcaggcacatggctcattaatgaagggatccagctatcgaggcgggtaaacagccaccagaacgcgccgcccatcagaatgacgttgactaataaaggcaggaacacgaaacgtcggatccctggcagcctgatgagtttccagccttgtgaaaaatagtagacgccgctacgtggggtagttgcggatgatgaaaccatagtcaggcgatgctccttttttaacattcagtgtgaatgcccgcttattttatcgggttgccagacaataaccagttaggaaatgttcgaaaaaacagcaaaaagcacgatttagttcatctttatggggtgaaaggggcagacgcacttgcacttgatgtaatcggcaaatactcttagtgagtaaatgtttgccgtggtggcaaggtgttagaacaacagagaatataatgatgcaggatttgcgtctgatattaatcattgttggcgcgatcgccataatcgctttactggtacatggtttctggaccagccgtaaagagcgttcctcgatgttccgcgatcgcccactgaaacgtatgaagtctcgcgacgatgaaacatcggaaggcgatgactttgatgacgatgttgaaggcgtaggtgaagttcgcgttcaccgggttaatcacgccccgaacggcgcatatggggagcaagaagcacctcgtcaggcgccgcaacaccagtatcagcctccttatgagcgtcaggtgcagcagcctgtgcgtcaggacgagccggtgcatcagacgccgccgcacgcgccgcgcccgcagcagcctgttgctccgcagccgcaggcccagccgccgcatcatgttgcccctgctcagccggtacatccagcgcagccggtccatcagcctcagccggtaccgccgcaatatcagcagccggtgcagcctgcgccgcagcagcctgtagctcaacagccggctccagtccagcaacctgttgctcaacaagctgcgccggttcaacagcctgccgcgccgcagccgcaacaggcgcctgaagcgccagccgctgaacctcagcagcccgccgccgcgccgcagccgaaagagcgcaaagagacggtcattgtgatgaacgtcgccgcgcatcatggttcgcagcttaacggtgaactgctgatcaacagcatccagcaggccggctttaagttcggcgatatgaatattttccaccgtcatttaagcccggacggtagcgggcaggtattgttcagcctggcgaacatggttaaacctggcacctttaatccggatgcgatggtggatatgaccacgccgggcgtgactatctttatgcaggtgccgtcgtttggcgacgagctgcaaaactttaaactgatgctgcagtcggcgcagtacatcgccgatgaagttggcggcgtggtgcttgacgaccagcgtcggatgatgacgccacagaaactgcgtgagtatcaggatcgtattcgcgaagtaaaagaggcgaatgcctgatctacgcgctagcgtgtcgtctgcttaatctgaacccccgcccgtcgggggttttttatcattgatggtgcgatatggaaccgatcgaacaaaaactgactgaactgcgaaccacccttcgccatcatgaatatctgtatcatgttatggacaccccggagattcccgatgcggaatatgaccggctgatgcgcgaactgcgcgaactcgaagctcaacaccctgaactgataacccctgactcgccgacccagcgagttggcgcggcgccattggcctctttcagccagattcgccatgaagtgcccatgctgtcgctggataacgtctttgatgaagagagtttcctcgcctttaacaaacgcgtgcaggaccgtttaagcgatacggcggatctgacctggtgctgcgaactcaagctcgatggcctggcggtcagcatcctctatgaaaacggcgtgctgatgcaggcggcgacccgtggagatggcaccaccggcgaggatattacctccaacgtgcgcaccattcgcgctattccgctgaagctacgcggcgacaatatcccggcgcgtctggaagtgcgcggagaagtgttcctgccgcaggccggatttgaaaaaatcaatgaagaagcgcgccgcaccggcggcaaagtgtttgctaacccgcgcaatgccgccgcgggctcgttgcgccagttggatccgcgtattaccgcgaagcgaccgcttactttcttctgctacggcgttggcgtgctggaaggcggcgaactgccggccagccactctgcgcgtttgctgcagtttaagcagtgggggctaccggtgagcgaccgcgtgaagttgtgtcattctccagaggaagtgctcacttactatcgccaggttgaagaagaccgtccgagacttggttttgatattgacggcgtggtgattaaagtcgattcactggcgctgcaggagcagcttggtttcgtcgcccgcgctccgcgctgggcggtggcctttaaattcccggcccaggagcagatgacttttgtcaacgatgtggaattccaggttggccgtaccggagcgattacgccggtagcgcgcctggaaccggtgcacgtggccggggtgctggtcagtaatgccacgctgcataacgccgacgaaatcgaacgtttaggtctgcgtattggcgacaaagtggtcattcgccgcgcgggggacgtgatcccgcaggtcgtcaacgtggtgctttctgaacgcccggaacatacgcgtgaaatcatcttcccaacccattgtccggtatgtcattccgatgttgaacgggtggaaggggaagccgtggcgcgctgtaccggcggccttatctgcggcgcacagcgtaaagaagcgctgaagcactttgtctcccgacgggcgctggatgtcgacggtatgggcgataaaatcatcgatcagctggttgagaaagagtacgtccatacgccagccgatctgttccgcctcagcgccggtaagcttaccgggctggatcgcatggggccgaaatcggcgcaaaacgtggtcaacgcgctggagaaagcaaaagagacgactttcgcccgcttcctgtatgcgttaggtattcgtgaagtcggtgaggcgaccgccgcgggactggcggcacattttggcactattgaagcgctggaacaggcttcgattgaggaactgcagaaggtgcctgacgtcgggattgtcgtcgccacacatacttttaacttcttcgccgaagagagcaaccgcgaggtcatcgcgcaactgcgcgcggaaggcgtccgctggccggcgccggtggtggtgaaggcggaagaaattgacagtccgtttgccggtaaaaccgtggtattaaccggtagcctcagccagctttcgcgcgatgatgccaaagcgcggttggtcgcgctgggggcgaaagtcgccggcagcgtgtcgaagaaaaccgatctggtgatcgccggcgaagcggcgggttctaagcttgcgaaggcgcaggagttaggcattgaggttatcgacgaagccgaaatgatgcgcctgctgggagaataacgtggataaagcacagctcatcgagattgctaataccgagatgccgtttggcaaatataaggggcgtcgattgatcgacgtcccggaagagtatttgctgtggtttgcccgtaaggatcaatttcctgccgggcatctcggcgagctgatggcgttgaccttattgatcaagaccgaggggctgacgcaactggtgcaaccccttaaacaaccgcgttaacctgccgtggcgcgggatttctcctgcgcctgttgggcgtctgtctgcgctttatagcgacgagccagtacggcgcagaccatcagttggatctggtggaagatcattagcggcagcaccattattcccagaatcgacgcggggaacaggatattcgccatcggtatcccgttcgccaggctctttttcgagccgcagaagacgatggtaatttcatccggcttgctaaagccgcagcggcgagcgacaaagatgttgatcgcgatgacaatagccaacagtaccaggctgacaacgacgataaacagcagcgatcccacacccactttgtgccagattccattgacgacggcttcgctgaaggcggagtagaccaccagcaagattgaggtctggtcggttttgccaatccattttttatgtttcgccacccaactaccgatccacgggcgcgacaagtggccgagtacgaacggcaataataactgcagcataattttgccaacctgctgcaaatcgccaccagcgccatgcaaatgcatcagcagtcctaccagcaatggcgagacaaaaataccgagcagacttgacgcagaagcggaacagaccgccgcggcgacgttaccgccggcgagcgaagtaaaggcaattgctgactgtacggtcgccggcaatatgcaaaggtaaataaaaccgctatagagcatcgggtcgactctaatcggcgcccaccacgcaaacagcacccccagaaccggaaacacaataaaggtgctgcacatcacccacaggtgtaaacgccagtggctgccgccggcgataattgcttcacgcgacagcttggcgccgtgcataaagaataacagcgcaatggcggcggtagtgagatgctcgacgaaagggacgaattcgccgcgcgccggaaagaacgaggccagcagaaccacggtaatcaatgtcagtgtaaatggatcaagaatgcggaaaagtttcataaacgctcctgaaattcgatgccgctattgtgctttctttgttttgagaaataaaattgatttattgcatctattcatgaataaaacagatgaattattcgttacgtcagttaaaggtctttgtcaccgttgccagggtgcgcagtttcagccgtgccggggagattattggtctcagccagtcggcagtgagccatagcgttaaggaactggagcaccagaccggcgtacgtttgctcgatagaacgacacgtgaagtggtgctcactgaagctggccatcagctggcgggcaagcttgagcgtttgcttgatgaactccatgtgaccctgcgtgaagcggggcgggtagggcagcagttgacggggaccgtgcgcgtcgccgccagccagaccatctcggcacatctgatcccgcaatgcatcgctcatagcaatcgccgctatccggatattgatttcgtactgcatgacagaccgcagcagtgggtgctggaaagtatccgtcagggcgaggttgattttggtatcgttatcgatccggggacggcggcagatctgcagtgcgagtccgtgttggcggaaccttttttgttgttatgtcgtgaggatcaccgtttttcccggcagtcatcggtcaactggcaggagttgcaaggggagaggctggtattgcaggactatgcttccgggagtcggccgctgattgatgccgcgctggcgcgttttgccatcaaagccgatattgtgcaggaaattggtcatccggcgacgctgttcccgatggtggaatcggggattggtataagcgtactgccggcgctggctttaccattgccacagggcagccgtttgcaggtaaaaagattaacccctgttgtggagcgccaattgatgcttgcgcagcgaaaaaatcgctcgctgtcgaccgcagcacaggcgctatgggaaatcgtgcgtgaagagggcgcaaacctgacatcagccaggatcgaggacccgctgtatcagcgctaagtgtgattctgaacgctggtggggaacgctactttttgtcttgcgcaatcgtagatatttcctttttccatgcctggtgaaaaccctactttagtctgtttagaaatcaacagccccaattttgaatcattgtttaaatacactacgttcgttcaacttgtttacactatacagagaatagagcggagcgtgtcattgtcgggcggccgagctgttgaattttccacacgctatttgagaatggtaaaaatggaattatcagtcccttttatgctcgtaattatttccattgcctcactgcttgctcagtggttggcgtggcgattacgcataccttctatcctgccgctgctgctcatcggcgtactacttggcccggggtgcatttattgcaacccgatatattatttggtcctctgcttttccctctggtatcgctatcggtggccatcattctgtttgaaggggccctaacgctacgttttgacgagattcgtggcttgggtggcattgtgcgcaatttagtcacaattggaatgttgatcactttcgccgttatctcactaacctgctggggaattttaggcctcacgccgcagatttctgcgctgatcggggcggtcacggtggttacagggccgacagtgatttctccactcatgcgagtggttcggccaacagcctctattaatcaggtactgcgctgggaagggatcgtcattgatccggtgggagcgatttttaccctattagtatttgagtttattactttgcaggagcaaacgggcacatggcttcatttgctgatcatgcttacaaaaacggtagttatagggctggtgagcggggcggtgtttggcgttttcttagggaatgcgctcaggcgtggttggatccctggttatctgcaaaacttcgctgttttatccctcgttctgttgacgtttggcgtgtccaatacgttggcggatgaatctggtctgcttgcggtaacggttctggggatctggctggctaatatgcgagaggtcgagaccgcggatatcgttgaatttaaagaagagctatccgccatcttactttcagcgctatttatcatcctggcagcccgtcttgatatccatgcactctgggcgatgggctggccgctgttgatattgatgcttatcgtccagtttgtggcccgtccactatgcattcttgtttcgacatggcgttccagcttgcactggcgtgacaggctgatgttatgttggatcgctccgcgcggaatcgttgctgccgccgtcagttccctgtttgctttgacgctgcaaaaaaatggctatgagggtgcggatcagctggtaaccgtcgttttcgcaatcattataggtacggtagttttgcaaagcctcaccagcagtcaattggcgcgctggcttggcgtgcagcaacgtaagcctcgaggagtgctgattgtcggggcgaatacggtcgccagaacgctggcccaggcgctcagaaaactcgatattccggttcaactgagcgataacagttgggaatactaccgactggcaagaatggaagggctaccaacatactatggcaatgtctggtctgaacatgcggaaaactacctgaatctgagtgaggttcgtcaggtaatcgccttgtcgccaaatcgtcaccagaatgcgctcaccgccctgcattttcagcatatatttggtaaaaatcgcgtcttctcaatccgtacgggacctgtgaccaaaggacgtagtgagaaagaaacgcgtcacgaacagcttttcgatactgatatgacttgggcacggcttagtagcctgatagcgaaaggcgcagtcatgaaagtcactcgcctgaataacaattttggctggccggagtatctcagcaccaaccccggtgcaacaccgctgtttgcgcaaagagaggatggcaatctgatagcgattaataatggaatcatgccgccgccaccctgtaccgtcgtggcgattatcgaacctggagtggaaagtgaaaaaactccgtcagaagcgtattgatagcctgttcttcatcgttggctgtgcaggccatttcgctgtctggcgttctgcgcatagcaaaaaggcgcctttagggcgcctttttacattggtgggtcgtgcaggattcgaacctgcgaccaattgattaaaagtcaactgctctaccaactgagctaacgacccgaagtggtgggtgatgacgggatcgaaccgccgaccccctccttgtaagggaggtgctctcccagctgagctaatcacccacttcggtacttcacattttgacagaaaatccagctggcgagaaagtggtgggtgatgacgggatcgaaccgccgacccctccttgtaagggaggtgctctcccagctgagctaatcacccacttctcaattttctgtgctacacggcggagactacgtaaagtagttggtgggtgatgacgggatcgaaccgccgacccctccttgtaagggaggtgctctcccagctgagctaatcacccccgctgtgtggagtcgcattatagggagagttgaaattgagtcaacgccttttctaaataatttgtttgttcgtcgtaaaattaaacaaagcgatcgcaaaaacagcttcggcgtatgatttataaacaaaaatggtaaagcgtgatgttgagacgggatctacattgaggaatcagcctgtggtgttagaatattcccctatcaattccaagaacactgccggctatcggcatctttattaaacgtaaggccaattcatgaaaatcaaaactcgcttcgcgccaagcccaacaggctatctgcacgttggcggtgcgcgtactgctctctattcctggctttttgcacgtaaccacggcggtgagtttgtgctgcgtattgaagacaccgatctcgaacgctccaccccggaagcaattgaagccatcatggatgggatgaactggctgaatctggaatgggacgaaggcccgtatttccagactaaacgtttcgatcgttataacgcggttattgatgaaatgctggaagcaggtaccgcttataaatgctactgctcgaaagaacgtctggatgcgttgcgtgaagaacagatggcgaacggtgaaaagccgcgctacgacggccgctgccgtcatgatcatcagcatcacgccgctgatgagccgtgcgtcgtgcgcttcgccaacccgcaggaaggttcggttatctttgacgaccagatccgcgggccaatcgaattcagcaaccaggagctggacgatctgatcattcgccgtaccgacggctccccgacctacaacttctgcgtcgtggtggatgactgggatatggcgatcacccatgtgatccgcggagaagaccacatcaacaataccccgcgccagatcaacatcctgaaagcgctgaacgcgccggtgccggtttatgcgcacgtatcgatgatcaacggcgatgacggtaaaaaactttccaagcgccacggcgcggtgagcgtgatgcagtaccgtgacgacggctacctgccggaagcgctgctgaattatctggtgcgcctgggctggtctcatggcgatcaggagatcttcactcgcgaagagatgatcgagttcttctcgctgggcgcggtgagcaagtctgccagtgcgttcaacaccgataaactgctgtggttaaaccatcactacatcaacacgctgccggcggaatatgtagcgacgcatctgcagtggcacattgagcaggaaaatatcgatacccgtaacggcccgcagttgtccgagctggtcaaactgctgggtgagcgttgcaaaacgctgaaagagattgcccagagctgccgctacttctatgaagagttcgccgagttcgacgccgatgcggcgaagaaacacctgcgtccagtggcgcgtcagccgctggaagtggttcgcgataagctggcggccattagcgactggacggcagaaaatgtccatcatgcgattcaggcgaccgccgatgagctggaagtgggcatgggtaaagtgggcatgccgctgcgcgtggccgtgactggcgcaggtcagtctccggcgctggacgtcaccgttcatgcgatcggtaaatcccgtagcgttgagcgtatcaacaaagcgctggcgtttatcgccgagcgcgaaagccagcagtcctgaggccgagcgtaagtcaaaacaagcggcaggttagtcctgccgtttttttcgccgctattttgtcgtagtgttaatgcctaaccgcgccaggaaaccactaataccatcgcgtgcaagaagatcgcgcagatatgtttgttccgcgacggtcatcagctgcagcgtatcagcgatttgtcgccataccgcatctgcttcattaataaagtagccgctgggctgttcagcgagctggtactcttcattcagatggcgaaatgccggaatattggtcagaaaatcaatcactggccggtcgatgacaattaaacgcgcacgcccgcctttgacgccgggaatcgcctcggttcgccacttttgttcccgcgtccagcggttgaccgtttgtctggccagacccagaacttcggcaagctctgcaggcgtcattttttctttcagtttcatcattcgtattttactggccgcgtattccaagacggtttaacaacccggttatgccttcacgcagcagcagcgacattagctgcttctgttcgcgatgagtcatctctttacagagcgtaagcaataatggctcgagatcggtctcggcgaccgaatagggcgagggcgtttccgctacgcgctgggcattgcggataaactctcgtacctgctcgttaacgtgtacgagacgcgccttgcctccctgcacgccaggccgaggagaagtttgccacccctctttacgaacccatttattaatcgtctgtcggctgaagccagttagatgcgcaatttcttccggagtcattcgttccttgagcatactatttcctgagtaaatatgtgggaattagtgcttcatgttatagcatccttttacaggaaatagtgacatgtttaacgcctgcctgcgataaggctcgcattgtcagctatttgcctgctttttcagcgattgaatcaggagagataattttgccgttgacacctggcgaaggaattcatattatgccgcccgtcaacacgacacgctttacgttacggggctatagctcagctgggagagcgcttgcatggcatgcaagaggtcagcggttcgatcccgcttagctccaccaaatcctgcacccagcagatttggttcgtaaagaggtcctgtggggctatagctcagctgggagagcgcttgcatggcatgcaagaggtcagcggttcgatcccgcttagctccaccaaaattcaaaccctcgctacggcggggtttttgcttttggcgccgtcaatgtaaatgactttaagcttacgtcaacgtgtatcgagcaaataaaaaccaacgtaatttaggaatttttctcggtttattttcttgcctgctattattaaccaacatactattttctgattgcttataattttttagccgcagaggtgttgattaacaataatgactgacatatttaacatcaaagttaaaaaaactctgctggcgttaattgtttgtttgatttttattccgctatctcgattaatttctccgcaaacccttatcgacggaaaacaaatttatctggcatggctgccattaagcgtcatgtacgcaaccatttgtatttttggtcgttacgccgttgcccccttgattgttgcgtttgcaattactaatacatttgtaatagatctaacttatacacaggccgctatcctgttattttgtcagttattttccgtctttttcaccttcgctatcatgcgctcgttgtcggggaaaaaatggcgtagcggaaggccagcgaagcgccatatcggtcgccgtatcttctggggcggcttctttgcccccattctgcttaagctgacgatgtatctggcggggcgcttcttcgccttcccgcttgccgtctccagctacttcagtaccgcgtcgatcatctattccgttattgatatccaggcgttgatatgcgccgccttaatctttactaccgctttctattacccgatgagaatgattgttagcccacgttatcggcgggtgttttggctgcgtcattgtcaaccgtggctggtgaaagaaagaagagcctttaccgtatattggtttatggcattaatcacaatcatgctggtgctatgtgctccttttgattcagatttaattgccggatatctggtgccgattatttttattctctatttcattggtatcggtcgtctgggacatgaattaattcgcattacgtgggctatttcggcattctttttagtagcctataacaaaaattttctccagggcgttcagtcggggtactccttgtcatttgtcctgtcggtgttaatttcattcacgatttgtttgttttacatgacggatatttattcgcgtagcgacagaattaaacaacgctggcgcgatcgggcagaagaagatccgttaaccggattacccaatctgcgggcgctggaggggcatttgcgccggtcgccacgggttgttattagcagcctgcgtatcgaaaacctggactttcttagccgtcactatggcatgatgatgcgcgtagagtgcaaacggcaaatagctcgccgtctgcagccgctactggatcaccacgataaaatttatcagctcccgggtagcgagttattgctggtgatagaggggccggaaccggctgcgcggctcaaccacatcgtcgcgatgcttaaccacgctaaatttaactggcacaaccaggctctggatttagagtttggcgcggcgtggggcaattacagcggcattgagacggaattacaccccatgctcggccagcttagctggttatcggaacaggccggcgccgtgcagcgggtgctggcgttagatatcgcgcaggaggaggtttccgatcaaacgaccgaacaggtacggatgctgacgaaaataaaacaagcgctgaacgagcgtaatctgctgctgttagcgcagccgattcagaacgcagaaggggaggggtattacgaaatcctcacccgtatgcgttgcggcgagacgattatcacgccggatcgttttattccgcttattgcacagttcaacctcagccagcgcttcgatatgctggttctggaatcgctgttcagccagcttgatcaacaccccggccgtcgcttctccgtcaatttgttgccttatacgctgatgcaaaaggatagcgccgctcagattatcgcgctgtttaagcgttatcgcgtatcgccagcgtatattacgattgaaataaccgaggagcaggcgttctcgaatgcggataccagcatgcataatattcagctgctgagtgagttcggttgcgctatcgccattgatgacttcggtaccggttacgcgaactatgagcgtctgaagagcctgcaggcggatatcgtaaaaattgacggctgctttgtgcatgaaatcgagagcgaccaacttgatgcgattatcgtcaaatccataatcgaaatcgcgcgggcgaaacagcttacggtagtcgcagagtacgttgagacagaggcgcaaaaggcgatgctgttggcgctgggagtcgattatttacagggttacctgattggcaaaccgcagccgttgagtgaattgaaggcgtaaaaaagccgggcgataacgcagcccggcttgttgtgctgttaacgtctgtttgagattacagcaccagcgcagcgatggaagctgacaacacgctgaccagcgtggaaccgtaaaccagtttcagaccaaaacgggaaaccacgttaccttgctcttcattcaggcctttaatcgccccggcgataataccgatagaagagaagttcgcgaaggagaccaggaagatagagatgataccttccgcgcgcggagagagcgtcgccgccactttctgcagatccatcatcgctacgaattcgttagacaccagtttggtcgccataatactgccgacctgcagcgcttcgctcgcaggcacacccatcacccacgcaaccggatagaagatgtagccgaggatcccctggaaggagatgctgtagccaaaccagccggtgacggtcgcgaacagggcgttaagtgcggaaatcagcgcgataaagccgatcagcatcgccgcaacgataattgctactttaaagcctgccagaatatattcgcccagcatttcgaagaagctctgaccttcatgcagattggacatctgcaggttttcttcgctctgttcaacgcgataggggttaatcagcgacaggacgataaaggtgctgaacatgttaagcaccagcgcggcaacgacatacttcggctgcagcatagtcatatacgcgccgacgatagacatggaaacggtagacatcgcggttgccgccatggtgtacatacggttgcgcgacattttgccgagaatatctttataggcgatgaagttttccgactggccgaggatcagcgagctaacggcgttgaaagattccagtttacccatgccgttaactttcgacagcacggtaccgatagcgcggatgacaatcggcagaatgcgaatatgctgtaaaataccaatcagcgcggaaataaagacgattgggcacaaaaccttcaggaagaagaaggccagacctttatcgttcatgttaccgaatacgaagttggtgccttcgttggcgaaaccgaggagtttctcgaacatctcggagaagcctttcacaaaacccagaccgacatcggagttcaggaagaaccaggccagcaaaacttcaataacaagtaattgaataacataacgaatgcggatctgcttacggttgtgactgaccaacaaggccagtatagccaccacaacgatcgcgaggacaaaatgcaagacgcggtccatatttgctccaaatatgaggcaggttaaatttccgtgcacattctatgcaacaagcctaaataaaacgagatcgaatccacactattgcaaggatatgtgaccaataacaaaaatagtgatcaatcgtacatttttgttatgttatgcaaaggtattaaaagttgcattaatgtactaatctgatgaaaggcgcgttgtccacagcttcacgcccgtttcgttatttggcctactatcgttccctcctatcaaagcaatcattatcacctttctaaatgaacttgataatcattcgcattttgatagcattaaacatagcaaaggctatatttccaggggcagaaaatgactagcagtcgcgttgagaatagcagcggtcgcgcagcgcgcaagatgaggctcgcactgatggggcccgcgttcattgctgccatcggttacattgatccgggtaacttcgccacgaatatccaggctggcgccagctttggctatcaattgttatgggtagtggtgtgggcgaacctgatggcgatgctgattcaggtgttatcggccaaactcggtatcgccaccggtaaaaacctcgcggaacagatccgcgaccattacccgcgcccggtggtgtggttttactggatacaagcggaaattatcgccatggcgaccgatctggctgaatttatcggcgcggccatcggctttaagctactgctcggcgtttccttattacagggggcggtgctgaccggcatcgcgaccttcttgatcctgatgttgcagcgtcgcgggcagaaaccgctggaaaaagtcattggcggactactgctatttgtggcggcggcctatgtggttgaacttatcttctcgcagccggcgttagcgccgctggccaaaggcatgattattccgagcctgcctaatggtgaggcggtattccttgccgccggggttctcggcgcgacgattatgccgcacgttatttatctacactcgtcgctaacgcagaacctgcacgatgggtcgcgtaaggaacgctataacgccacgcgttgggacgtggcgattgcgatgactattgccggcttcgttaacctggcgatgatggcgaccgccgccgctgcgtttcatttcaacggccacaccggggtggccgatctcgaccaggcttatttaactctcgaaccactgcttagccatgccgccgcgacgatttttggtctcagtctggttgccgcaggtctctcgtcgacggtagtagggacacttgccgggcaggtcgtgatgcagggttttattcgcttccatattccgctgtggtttcgccggacaattaccatgctgccatcgtttatcgtgattttgatggggctggacccgacgcgtatcctggtaatgagtcaggtgttgctgagcttcgggattgcgctggcgctggtgccgctgctgatttttaccagcgatgcgcgtttaatgggcgatctggttaacagtcggtgggtaaaacgcatcggttggctgattgtggtgattgtggtggcgctgaacggctggctgattattggttcagcattagattaatgcggacaacaaaaaagggagctttcgctccctttatcaattagtggtgcccgtggccatgtcctcgaccaccgccccagccgccgcgacgaccgccccaatcaccacggcgatcgttccagccttcacgatagccgcgctcgtaagcgcgaccgcgatcccagccgcgtttatcccaaccgcgatgcaaaccattatcatggcggtgccagcggttatcgcgccattcatagtgacgacgccagtaatcgcggtcgcgccagccgccaccgtcccagtagttaccgtaaccgtcgcgatcgccaatttgtaattttaccgatggcagcagggtgatttcaccagcgttggcgacaaccggcgcgcaagccaacagtaccgcagccagaatcagtgacctgaacatactcttctcctcacgatcgggtcttaaatgacctgttaaccagatattacgagccggtaaagaggcgtagcatcagggaactcttaaatcgcaagaaatagcactttttgccaaagtaaaaatgagtttacaccgcaaggatcgcgtcaatggcggcgcactcttcagcgctgaactggcgattgcttaacatgcccgcggcatcgtccagttgtgccgtcttactggcgccgatcagcactgacgtcaccttatcttcacgcagcacccaggctaacgccatctgtgagagcttctgtccgcggcgcccggcaatggcgtcaagctggcggacttttgccaaccgctcggcggtgagctgttccggctgtaaaaaacggctattgctggctgcgcgcgagtctggcggaataccgtttagatagcggttggtcaactgcccgccagccagcggtgaaaacgctatacttcccacgccttcggcctgcagcatcgctaataatccttcttccacccagcgttcaaacatcgaatatttgggttgatgaatcagacaaggcgtgccgagatcgttgaggatagcgatagcctgacgcgcctgctcaagcgggtagttcgataaaccaacatagagcgctttcccctggcgaaccagatgatccagcgcccgcatggtctcttccagcggcgtctccgggtccgggcggtggtgataaaagatatcgacgtactcaaggcccatccgcttcaggctctggtcgagactggcgaccagatacttgcgcgatccccagtcgccataggggccgtcccacatggtatagcccgctttactggagatgatgagttcatcgcggtagggcagaaaatcttctttgaggatccgcccgaagttgctctccgccgatcccggcggtgggccgtaattgttcgccaggtcgaagtgggtaatcccaaggtcgaaggcgtgacgcagcaacaggcggctgacctctacctgtgtctcatcgccaaagttatgccacagacccagagatatcgccggtagcttcaggccgctgcgcccgcatcggcggtattccatggtctgataacgcgtgtcgcttgcctggtaaaccatacttcctccgcataaaaacagggtgtgtatacgtttacactaatcaatgttacacgcggagtatatggggaaaacgcgtaaattttgctttccaccctctttgttgctcacaatctggacaggtaaaacgcatatctaatactcagaatacctgcacaacaacaaggattatggatatgcaaccgacttacaccattggcgattatctgctggatcgtctcgtagattgtggtatcgatcgcctgttcggcgtacctggtgattacaacttacagtttctcgatcacgtgatagcccatcaaaatttgggatgggtcggctgtgctaacgaactgaacgcggcctacgccgcagacggctatgcgcgcattaaaggcgccggcgcgctgctaaccacctacggcgtaggggagttaagcgcgttaaacggggtcgccggtagctatgcggaacatatcccggtgctgcatattgtgggcgcgccttctaccggcgcgcagcagcgcggcgaactcctgcaccatacgctcggcgatggcgatttcacccatttctcgcgaatgagcgaacatattacctgcactcaggcgacgttaacggcgggcaatgcctgtcatgaaattgaccgggtattaagcgagatgctgacccaccatcgcccagggtatctgatgctgcctgccgacgtggcgaaagcccgcgcggtgccgccggcccgcgcgctggtgattaagggccctgcggccgatgaaaaccagctcgccggctttcgcgagcacgcggccaaactgttacgcagcagtcgccgcgtgtcgctgctggcggattttcttgcccagcgttacggtctgcaaaccacattgcagcagtgggttaagtccgcgccgatcactcacgccaccatgctgatgggaaaagggctatttgacgaacaggcctcaggttttgccgggacctatagcgggatcgccagcgcgccacaaactcgcgaggcgatggaaagcgccgatgccatcatctgcgtgggtacgcgctttaccgatacgattaccgccggctttacccatcatttgccaacggagaaaaccatcgaaatccagccgtttgccgcgcgggttggcgatcactggttcagccggatcccgatggatcaggcgctggcggcactcattgacgtttctggcaagctctccgcggaatggagcgcgccagatatcatcgcgcccgacgcttccggcgcgccgcagggtaatctgacgcagaaaaacttctggagcaccgtcgagaaacagctgcggccgggcgatattattcttgccgatcaggggacttcggcattcggcatcgcctcattaaaacttccctcgcaggcgacgctgctggtgcagccgttatggggctctatcggttttacgctacctgccgcttacggcgcgcagacagccgccgcggacagaagggtggtattaatcattggcgatggcgccgcgcagctcactatccaggagatgagttcaatgctgcgcgataagcataagcttttaattttgctgttgaataacgagggttacaccgtcgagcgcgcgattcacgggccggaacagcgctacaacgatatcgcgttgtgggactggagccgcttccccgatgcttttgcgccggatacgccttctcgctgttggcgggtatcgcaaaccagcgagctggcggaggcgatggccgatagcgttaactccgataagctaacgatggtcgaagtcatgctgccgaaaatggatattcctgacttcttacgcgcggttacccaggcgctggaagatcgcaacaaccgcagctaatcgccgcggcgtttggcaatcatcaacggcttcccggccagcagtagccaggccgggagcatcacgatacatagcagcggcagcaaggtggtatccggcaccactactgccgccataaacaggctcagccagccgtcgcgggtgacaaccagcaccaggccgaggatcgcgcaagagatggtaatggcggccggtaccgcttcaacatgagcatgcagcattagccccaacgagacgccgacaaacaccgccgggaaaatacgcccgccgcggaaaccgcatgcggctgccagcaccagcgccgccaatttcaccacggcaataagcagaaaatcggtggcgccaagcgtctggctggatgccagttgctgcatttcgtccagacctttaaatagcgtaatatgcccgccaataacccccaggatccccagtaagaaaccaccgatgcccagcattaataccggatttttcaggcggtggatgagcgcatgcagacgcggcaggcaccacacggcaaccatgcccacggcgatggcgataagcgtaacaatcgcgccgctgatgatatcgacgatgcgtaggtgcggatagtgtgggattggcagggtgaaattgggatggaaaaaaataccggtcgtcaatgcgcccgccgccgccgccagtagtggggcaaacaaccgatcccacaacgggacgtcgctgctgctattgagcgtttgcgaaaaaataagcgcggcggcaaccggcgtaccgaacagcgcgccgatggttcccgacgcggcaaggattgtccagtccagcgaacttacccgcggaaacaggcgcgaaccgagggcgacggcaagcgcgatattgacgaccatgatcggatgctccggtccgagactgacgccgcccgcgaggccgagaatcaatgccgccagtaatcctggtagcgcgctggtggcgatgggcgcgccgatcaaggattcggtcgccggatcgggccccccatgaccgggctgaaacggactaccagccccacggcaatcccggtgagagtgaggatggcaattatccacagcgggctatcggcggcaatgccgacatgtgccggcaggtcgctccacaagatgctctgcagaattgcggcgatcttcatcgccacaatcaataccaggctggaagcgataccaataagaatggcgggtatcgataacaacagcatcgttctggcgcgcgggtgcaacatgaagggttccttttaaatgtcctgaagcgctactttgcctgtctctgtaaagagcttcggcgcaaatggtgctgaaacgataaacttaaggccaaacctgacgttgcgtgcatgacataagatgccgtgttacatagattacaggctaaatgtgaccaatgtcgctaaaccaccggcggctgtacgttggtcattgttgttatgtcgccatgaatttacagtgtgcgaaaagaattattttgactttagcggagccgtaacggaatgacaaaatttgctttagtaggagacgtcggcggaactaacgcccgtctggcgttatgtgatatcgcaagcggggagatttcccgcgctaaaacttattccgggctcgattatccaagccttgaggccgtcgttcgggtctatctcgtagaacaagacgtgaaggtcgatgatggctgcatcgccattgcttgccccatcaccggcgactgggtggcgatgactaaccatacctgggctttttctattgccgagatgaaaaagaacctcggattcgcgcatctggaaattatcaatgattttaccgcggtatcgatggcgatcccgatgctcaaagccgagcacctgatccagttcggcggcgcgcaaccggtggagggaaaaccgatcgcggtatacggcgcaggcactggtcttggcgtagcgcacctggtacacgttgataaacgctgggtgagcctgcctggcgagggcggccacgttgatttcgcgccgaacagcgaagaagaaggcattattctcgaagagctacgtagcgagttgggccacgtgtctgccgaacgcgtcctctccggtccggggctggttaatctgtatcgggctattgtcaaatccgatggccgtttaccggagaacctgcagccgaaggatgtcaccgagcgcgcactggcggatacctgcattgattgtcgccgcgcgctgtcgctgttctgcgtcattatggggcgctttggcggcaatctggcgctaaccctcggcactttcggcggcgtgtacattgcgggcggtattgtcccgcgtttccttgagttctttaaggcgtcgggtttccgcggcgggtttgaagataaagggcgctttaaagcctacgtgcaggatattccggtttatctcatcgtccatgataacccaggcctactgggctctggcgcgcatctgcgccagacgctggggcaaatcctctaagcggctttccgtcgggcggcggcgtctgccgtcacccatctcattacagattcatcaactgacgaaactctttcaccttactgcggctgaccggcacctgaaactcaaggtcgcgtagccgtaggacgtaagtgttgttgaaccatggctctatttcgcgaattttattcagattgacgcagtacgagcggtggcagcgaaagaagtgcgcagccggcagtttgctgcagaattcagtgatgttcatcggcatgacgaatgattcacggcgcgtataaacgaaggtcattttttcatgcgcttccgcgtaataaatatcgtgaatgctggtgacgatgatccgctcatctttaatcagattaatggtgtcgttttcgcgggttgggttgtgcgcgggcgcaccgctcaccgccacctgctgctgttgctgccaggcgctggacagcttctgcagcatgttaataatccgcgattcctgataaggcttaaggatgtagtcaaacgcttccagttcaaaggcttccactgcatgttctttccacgcggtgataaaaacgataaacggcttatgcgcgaactggctaatattttgcgccagcagcacgccatcaagagagggaatattgatgtcgagaaagatggcatcgactttattgtgctgcaggaatttcagcacatcgagaccatcgtcaaaggtgccgacgatctccatctggctgtgagtattaatcaaccaggtgagttcctgctgcgccgggaactcatcctcaacaataatgactttcatgttttcttcactcatggcaacagcgacaccggttcactcgccggggcgtgctggttggggacgtagaacgcaatctccgttcccggcgtcaagcggcggatatgcagcccttcgccgtagagcagtttcacccgatgatgaacattcagcagaccaattttattgcccggcatctcgtcggcttcgacgcgggctaccaccgccgggtcaatgccgttaccggtatcccgtacgctaatgcgcacccggtttccgcattcgttgatggcgatggttaccacgcccttacctcgacagggttgaataccgtggacgatggcgttttcaaccagcggctgaatgagcaggctggggatgacgcaactgacgtcctcgtcaatatcataaatcaccgtcagtttgtcgccgaagcgagcctgctcgatcgcaatataatccttaatttggtacagctcgcgcttgatgtcgatctgctcgtcatctttcaactcaatgttatagcgtaaatagcgcgacaaattgaaaatcaactgtcgcgcggtatccggattcatgcggatggaagaggagatggcgttaagcgcattaaacagaaaatggggatttattttactctgcagggcgcgtagttccgctttattggccatttcacgcagttgttctgcccgcgagacctcaagctgggtggagataatttgcgacaggccgatcgccatctcctgcagcgaggaggtaatacgatgcgcgtggcagtagtaaattttcagcgtgccggtcactacgcctttctcgcgtagcggaatgaccagcatggagtggatctccggcgttctgtaggcttcatcgttgtttttaatgatgatggtgtcgctttcaatagctttacgagtcgttgggctgatatcgttgttacgatcgttatagttattttccccgtagccaacataagccagtacccggtcagtggtggttatcgcgaccgcatcggcattgatgtcccggcgaataatatcgcaaacctgacgcagcgattcgctattaacgtggcggaacagcggcagcgttttgttggcgatatccaacgccagttttgcctggcgcgccgcgctggcctctttctcgccttccacgctctggaccagcagaacaataaaaccaatgcagatgctgccaaggatcatcggaataccgattttggagacaatatcgatccccagcgccagcgtcggcgcccacagcaccacgaggatcatcgttagcgtttcgcacagcatcccggccagaatccctaccttccagcgctgggcttttgggattttgcgattgatgagcccggaaagtaacccggcgacaatgctggtgataaagcaggggatggcagtcacaccatcaatatcaatgagatagcggtgtacgccggcaatcatgccgacaatcgcgccgacccacggcccaaacaggatcccgccggacatcaccgcgataatccgtacgttaaccagagaaccttctaccggaacgccggaccaggtgctgaagagcgcaaacatggagaaaatggcggtaaccgccagcagctcgcgaggcgtatgcgccgatttatgcagcagttcgcgaaacaggcgtaagcggataagaaaaaagaggcaaatgagcattaatgccgcgcggtcaaaaaccgccagcagcatattaaatatatcgtgcatggatgcgcccaggattcgcgggaaagcaatatgatagaaaacctcacgccagaaggctagcagcagagataaatgaggaacaggcataaaaattaaaggggataagtcgttcgctccagctatcagggcatttatgagtaacgatgatacattttggtattataaatgatatcaatatgttgattgtttatttaagccgcgctcgttttgggaaaacgttctgccgcatactgatgcgtgatgacccgttttatgtgtgggcgattattttttatcaaccctctcgacagcgtgttttttttcaggttattttctaagcgagccacatcggtggccgcgtcgctcggacggtccgggcgctaacgttaatctgaggaatctatggctgaattcagtcctgaacgccgttttacgcgtatcgatcgtctccctccgtatgtttttaacatcactgccgaactgaaaatggctgcgcgtcggcgcggcgaagatattatcgatttcagtatgggcaacccggatggcgccacgccgccgcatattgttgaaaaactgtgtaccgtagcccagcgtccggatacccacggctactccacttctcgcggtattcctcgtctgcgccgcgcgatttcgcgctggtaccaggagcgctatgacgtggatatcgatccggaatcagaagccatcgtgacgattggttcgaaagaggggctggcgcatttgatgctggcgacgctcgatcacggtgatacggtgctggtgccaaaccccagctatccgattcatatttacggcgctgttatcgccggggcgcaggtccgttccgtcccgctagtggaaggcgtggatttcttcaatgaactggaacgcgcgatccgcgagagttatccgaagccaaaaatgatgattctgggcttcccgtctaacccaaccgcgcagtgcgtcgagctcgatttcttcgagaaggtagtggcgctggcgaaacgctatgacgtgctggtggtgcacgatctggcctacgctgatatcgtctatgatggctggaaagcgccgtcgattatgcaggtgccaggcgcgcgcgatgtggctgtcgaattcttcaccctgtcaaaaagctacaacatggccggctggcgtatcggctttatggtggggaataaaacgctggttaacgcgttggcccgcatcaaaagttaccatgactatgggaccttcacaccgttgcaggtggcggcaattgccgcgctggaaggcgatcagcaatgcgtgcgcgatattgcggaacaatataaacgtcgtcgtgatgtgctggtgaaagggctgcatgaggcaggctggatggtcgaatgtccgaaagcctcgatgtacgtttgggcgaaaattccgcaaccatatgcggcaatgggttcgctggagttcgccaaaaagatgctgcaggaggccaaagtgtgcgtctcgccgggaatcggttttggcgactatggcgatactcatgtgcgtttcgcgttgatcgagaaccgcgatcgtatccgtcaggctattcgcggcatcaaatccatgttccgcgcagatggactgctaccggcagccagtaaaacggtggctgaacaccacgaataaaaaatgggagccgcctggctcccatttcttttaccgcatagctggttaaatcatcagggcgaaggtaccggcccaaacgatgaccataaaagaaattcccatcaaaaagtatttcacgacatgtcactccgcatttcggcgaaacgcctaaatgaatttaactttaaccattgcaggattgtcgcagataaaaccagactattctggcgactgcggcagcccgaaattctgtgcgttaactgctccagatggcgctaatgtacgcttaaaaaatggtggaaacaagatccatttttttattaatttttagttacttacgactgtcgtgaataggcgacacattaatttcattcggtaataaattcaattatggcgacgatgattttaagcgatacccggacattctgtagttatttgattttgggattttttctataggcggggaggtgcagaaatcactttctgcaccctatagcgatgaggttagcgggtggttgtcgtcggtgcgcgccactgatgcggataacgcgcgggaacaaagcgtaaagtaagcgccattaagaggaaaacgcaaacggcgtggaattcccagtcgagctggtagtttccactcaggctgcgcagcagccctgaaagccacggcgataatccggcgataataaaaccgatgccctgcataaacgccaccagccgaccggcgacggctggctgcggcgaatgatccagcgccagcaccagacatagcgggaaggcgccgcccaatcctactccgcagctcacagcccataacaacggccactgttgcggtagccagatgaaaccgcagaacccgatcaactgtagcgacagcgccagcatcagcagcttacggcgatcttcgtggcgagcgagcatcggtagcaccagcgcgccggcggtttggccgacggtcatcaacgccagaagcgtgccgctaaactgagcgctgtggccaagctgcatataatagggcggtaaccaggcaatcaggctggcgtagccgccattgatcagcccgaaataaaggccgagcgtccacgcacggtggtggtgaaataccgacggcgcggcttgcgccgatgcggcaaccggcgcggcgggtaacattttgcagagcggtaaccagccaatgagcgcagccagggccggtagcgtccaccacgccagcgcgtggtgccagagcgcgctttgctgcgcaagccagggggtgattgcggcgcccaggccgcctccgcccatcagcgccgctgaccacaatcccatcacctgtggcgtacggcgatgaaaaagacgtttaataacgctgggtataatcgcctgaatcacgccgatgccaatccctccgagcagcgcgctgctaagcagcagaccgctttgcggcgccagctcacgcagcatcgcgccaatgctaatcgccagcaaacttagcgcgatactgcggttttcgctaatgtggcggttaatccagcctccggctagcgccagcacgcccatcgcaatgaccggaagcgcagtcaacagtgaaaccagggtaaagctcatgccggttgcttgctgcagttgcggcagtaatggacctatcgaagtcagtaacgggcgcatattaatgccgatcagtaccagcacaaatagcgtcagcgtattgcgttgcgtctggctcattacgctttacccgcccagcgctgatacagggccaatccttcgggttgtgggcaatggtgaatggggagtgattggctttctaaaggttgctgcaattgctggtagatagcggcggtagagagattgaagcgctcgccatcctgattgctgttagcaaaatagacttcgcgcacgccggttaaatacatcgcgctcagacacattgggcagggttgcccgctggcgtaaaccacacattcgcgcaatatctgattgcccatacgtagagaaacgtcgcggatggcattgagttcagcgtgcgcggtaggatcgccgctttgatgcaaggtattcaccgcttcggcaatgacttcaccgtggcgtacgatgacggcgccgaacgggcggccaccgttttcaacgttagcggcggcaagcataatggcgtgctgaagatggttattatgattggacatgagcggctcctgtagaggtcgggtagaagaactcaatcggcggcaggttggagattgaattctgctacagggtagcgagctaataccataagctaaaagacttatttataattgagttaatcagattaacttatggattgaggaaataccctggtgttctaccaggtatatccaacgccgaggatgccatacagttcgccgctgtgctggacaatggggctatcggcaatatcgtcatcatagcgttcgtagtttgccgccaccataccgacccaatgggggctaaagcggtagctggttatgatggcgaccattggcgataccgtcgtgccggtatcccactgcgggcgctcgggcgtcgcctcgcttgctgatatgccgccaaaatagtagttcgccatattatgactccgtaccatcaggcccatccccggcatcaccagcagattgtctttgatgatcggaaaatcagcccatagcagcagctcctggccgttgctgcggccgctgatatctgaactgatacgcgcgcttatcagcgcgtatggtgtgatccatgtggcgccaataccgccttccagttcgcctttacgttcgttcatccccctaaaagccgcattgtcgtcgggatctaaattaccgaaacgccagcgtccgtagccgtatagcgcgatagtgtcatcaagatgaaaatagtagcgggcgcggtcgcccagatacattaactggtcgccaaaatataatccgccgggtataaagtgggtttcgttgtcctgcttttggtagcgtgcggtgccgctaatcacagcccctccgagtacccatcctttcggcaccgggctattgaggttatctgcggaaaaaatgtcgatcgagccgaggtcgacctcagcgcgaggggagccgcaatataaagcgagggtaccgagaacggctacgggatatcgggatagtttcagcatgggctcatagttggcgcgaaatgatgaagtcgatgtgaatcgacacatgataaacaatagaagatatatagacgatagcgaacgtgatagggggatattttttgttttttatcgtactttttctgttttgcttttagtcgagaaagcaaagtgcgtcagtaccgaccctatcgccatggcggattattcgtgtgaataatccgcacaaaaatgaatattatgaattgaggatcagttcagagagtgaagccatcgaatgattttcgttggtgacgatgccttctttttttaatttttccataatggatttaaaggcgagctgtttactactttctgtcgcattcagtaggtcgcggttaaaggcgggattagattgaatgatataattaatgaattcgagcaacagcttattctggggtggagtggaaggttcattaatggttttttcattatatgaattcatcgcagcttcagaatattctagcggacgactgctgatggtgtgctcataaattttctcaatttctttgctggtaatatacaacttgcttagctcaatcgtcggcttatcatcattatcaggaatgaaattacagtagatgacgtttttagcaggggagataatgctcagcgaatcttcttgctgaatgttatccggattctccagcacgtccattaaatttcttgaatgagtgtgccataaaccagaaacggaaacgttgagcttaattttggcgatagcgctgtcgtgatcggcatcaatgaccgacacattttcattcagggtgatgatattgtttattttagagtgctgagaccagggcttattggctttggtaatatcatcaaaaccgccgtagccgtatgatgagtcgccaaaactttggttacgggttagtgcgctattgagcgtgccgcgattcttttttagtttcaggcagaggctgatagcgccgatatcgtgccagtgaagtaaatcttccagttcgcactgcaaaagtttttgcgcgcgggcgatagagcaatactccagcggtgggagattgttcaacttccaaatgtttctttctatcttattcatggcgataattatatgtaaatgtttttaatagtctgcgttcctgattaacagagcgccagcgttgttgttcgactacactatcctttctataaaaactattcagcagtgaaatataaattcacagttcagaatgtttatatgacagatgacggcagttaaaacacctaccataaacgattataatctcttttccttaataagatatagagtattgctaaattaacgatgaagagggagtaaaccgtggcgctttattctggtgatggatatgctctatattaattatagatggtgtaaataataaagacgccgcagcgcctttattacagtaactctcgcaggctcaaattagtgtgcactgttctggaaagtaaaaccgccatctcccacttgcgccttggcataccacgccattaaatccttggtgcctggcgcgccttcggctggcgcccatggcgcggaatcctgttcggctaccggctgatagcccccgtgcttgacttcaaagatgatcccgccgtgatcgagcgacaataccgcatgccaggtgccagccgccatttccagggcggtacactcttcgcctaataccacacgctgggtcacggtcccttgttcatcgaagttcagcaccacaaaacggccgcttagcggcagcagcagctcaaaagtatgaggatgacggtgaggacgaatgtaagttcccggctccatggcaatggccagacgctgtaccggatcgcttaattccggatgaaaattacgatgcgcccgtagacggggagcggccgccgcggcagcgctctgttgctgcatatcactgatggtgatttgtttcatgtatatcacctgctaaaaactgataacaaagactgacgcctggttggcatgagtcaggtatcgggcgttttgcgcgctgcagcgcagattgctctcccggttgcctgattatgcacattcagcgccattagcatagggtgattcattaatttcatattgatgaatatatttaagtgatttcttatttttgccgtggcgtcgcttaattttatctcatcttaatcattattcttttattgttattgaaggtgtgtagcataaaaatagcaaaatacccgagcgtttcttacagagggacacataattgagtatgcaatgtataagcgactgggtaagcaagcatgagccgctttgtgccgaaatagaaacggagtatcttgattttattattaaccagagtggtctcgattattccattaccccggcacttaaggccttttatccccctctccagtggcagtccctttaccttggtccgccggaagaatctctgcccgaaatggcgctgctcctgattcgtatcgcacttaatgtcccgctacagcggcagtggtttatcgaactggcgtataaaacgcagaccagaacgccattactggcaatagggtcgcagtggactttctccatgccaggcgaatggctacaggccgttactgccaggtatgcgataagacttatctttcggcttagcagcttctgcctgcttaacggtgagcatttgtaaaaatcgggtgggtaaatttatttgcctgttttttacccgccgaggagtgctgctgtcagcgtactctgacgaactattgcgaacaattcttttctgagatgcctggtatgagagggattttgcgaactactgcggattatggcgaactgctgataagtgtcccctgcaggaatcgaacctgcaactagcccttaggaggggctcgttatatccatttaactaaggggacaaggcggcaggattatagcgttttttccgccgcccgttaagcgcattgcgattaattgcttaatttgcagccgtttagccctttttatctgcttcggccttcgctttggctttctgttcctgggtcatgtcgttgcgaatctgggcgtggcttagcagggcgaagataaaggtgccgccgcagatgttgccggcgagcgtcggcagcgcgaagggccagatgaactcctgccagggcagggcgccgctgaaaatcagatagaaaatctccacactaccgacgacgatatgcgtggtgtctgccagcgcaatcagccaggtcatcaggatgatgacgatgactttcgccgagccggcggccgggaacatccagaccattgtcgccaccagccagccggaaataatcgcgttggcgaacatctcgccaggcgtattctccattactttctggctgatgctgtgaaatgcctcacgagtggcgtcatcgaaaatcggcatgatattaaatgcccaggcggcgatagccccacccaataaattacctaataacaccacgccccacagacgcagcaataacgcaatattaccggcgctgggtttatgcataattggcagcacggcggtgacggtattctccgtaaacagctgctggcgggcgagaataacgatgataaagccgaaagtgtatcccaaattctccagcagataaccgccgggcagggcgccgaggtgaacatgaaaaattcctttggcgaccagcgaggcgctaatcgacaagccggcggcaatcgccgaccacaatagcgccatggcatcacgctcaagttccttttcaccctcctggcgaatcacctcatgggtggccattgcctgcgaaggcagacgctcttcatctacttctattttctcaccatgctgcttttcttcgctttcaacttctcgttcatcgctatcatgtgtgccggtggcggtattttgtcgggtcatggctgctctccctttgtatttgttactaagcgtagagagaaatcagcgcggcggcacaggatatgctcctaaattcagcgcaatggcaagaatagcaatacgagtattgcaaaatatgtatagaatcgggaagctacaatgatgccaaagaaggctatgctgaaagcagctacccaacgataaaatgctaatgggggcgccgtcccggatgcctccagcgatagccagaattaacagggagaaacatatgaattatcgcctgtcggcgcttgcgcttggcgccacattgctggtgggatgcgccagttccagcactgacgatcggtcgcaggggcgttcagatccgcttgaagggtttaaccgtaccatgttcaacttcaactttaatgtggttgatccctatgttttacgcccagtcgccgtcgcctggcgtgattatgtgccgcaaccggcgcgtaatggtttaagcaacttcaccagcaaccttgaagaaccggcggtaatggtcaactccttcctgcagggcgatccttataaaggcatggtgcatttcactcgcttcttccttaacaccattcttgggatgggcggcttgatcgacgtggccggtatggcgaacccgcagctgcagcgtgttgaaccgcatcgtttcggtagcacgctgggccactacggcgtgggctacggcccgtatgtacagttaccgttctatggtagtttcaccctgcgtgatgagggcggcgacatggccgatggcctgtatccggtactctcctggctgacctggccgatgtctatcggtaaatgggcggtagaagggattgaaacccgcgctcagctgctggattccgacggcctgctgcgccagtcttccgatccgtacatcctgatgcgtgaagcctatttccagcgtcacgactttatcgccaacggtggtaagctgacgccggccgataacccgaacgcgcaggcgattcaggatgagctgaaagatatcgattcgcagtaatccacgcgattcataaaagaaaaagggtgaacatgatgttcaccctttttttatatcgtttgcttatcagaagcggtagttgaagttagcgccgtacagccaggcagtaccttcagaacggaaggtgtaaggaccttctttaatttctacgtgctgaccgtgcatgtaagagacacccacatccactgaagcatctttattgaacgcgtaggtggtaccggcgctcagccacaggcgatcctgatccgggatagagatggagcgggtgccagccggaatcgggctatcatcgaaggcgataccggtacggaaggtccagttatcgtcatagtaataggtagtacccagcgcgatgcggtaagcatctttaaagccttcatctttatagaacagcgtctggccattgctgccggtggctttcagctcctggaactggctccaacttgtgtaggtcaggctatagtgcactgcccactgcggcgcaacgcggttataaccggacagctcccacatctctggcagattaagggtcagcgcgccgttagtggtacggccatcggtaccggccggtagaccgaagttgccgaggatctggttatacgcggacggtagatcgctcttatagttgccatcaaagtcaattttaacttcggagcggtaggtgaaaccgtagcggttgtttttgtccagctcatagaggataccggcgttccagccgaagccccattcgttgccgttcaaatgtgcaatctgagtgtcggcagggatctgcgagacccggcccgccagcgctggcggcagcttgccggaaccggcaacgatttgtcctaaatcacctgcgtagcgttcgattttcgcttttgcgtataccgcgtcaaaccctaaaccaaaactccagttgctgttcaggcgatatgcgccgcttaaattgaggttaacggtggtgagatcggttttgccgcccatactgccggccgcatagtcatcagcgaattccgtcgcgagaccatagttagaggtaatagatgcgccccaaccaaactgatcgttaattggcgaaacaaagtggaagtttggtacccatgccgttggggcaatattgtctgcattcagacttttaccggtcggcgaagtaccagaaacattaacgtccgggtcgacgaagacggcgcctgccgacatcatcgggcggtcaaacatcatgattaacgcggggttacggctggcgttgcccgcatcgtcagcgattgccccttcaccggaataggcacgaccaaggccggaagcggagaattcatttaactggaatcctgcggaccaggcttgggttgaaacaagtgctacagccactgcaagggcagattgggtaaagcgggttttctggctcatgcccataacctcattgagttatttttatttaaactatgttacatgccgtaacagaagcgcgaagtgtagggtctgctttacgacagagaaatcagaccagtggcctgagtataggtctgaccagatgagttgttgcaagtttgtttatgagatttttcaattgtgataacagaaacgcgatccagctggcaaaattgccccggtgggtcatacccaatttggggcatttttgttttggatcatttttaagtgtgatttctgtcacttaaccgttttcctggcattaacacctggagggtggccggggcgggcgtaaaataggcgcattatttgtctggcaccgaaggtgcatatacagaggaaatctacgatgagtaaatgtagcgctgatgaaaccccggtttgctgctgtatggatgttggcaccattgtggacaacaccgactgcaccgcctcctacagccgcgttttcgccaaccgcgctgaagcggaagcgacgctcgccgcgctgagcgaaaaagcccgtaatgtggaatctgaaccctgcaaaattaactccacgttcaccgacgttgacggcggcgtacagttgagtatcgattttgtttttagctgcgaagcggaatcgctgatcttccagctgggtttacgttaatcctctctcttaacgcctctttccagaggcgttatcttttctattcaatgtgttttggctcccactttttctcttccccgattggcttaatgtaaaaaattagttaagactagttatcaggtcagaccacttggttttatcggttaacaggggagagttatgagtcaggcattaccgcttatcacccgtcagggcgatcgcattgccatcgtcagcggtttacgtaccccatttgcccgtcaggcgacggcgtatcacggcgttccggccgtagatctgggtaaaatggtcgttggcgaaatgctggcgcgcagtgaagttccccggaagtgattgaacagctggtctttggccaggtggtgcagatgccggaagcgccgaatattgctcgtgaaatcgtgctcggtaccggcatgaatgtgcataccgacgcctatagtgttagccgcgcctgcgccaccagttttcaggcggtagccaatattgccgaaagtctgatggccggcacgatccgcgcaggcattgccggcggcgctgattcctcctccgttctccccatcggcgtgagtaaaaaattggcccgcactctggtggatgccaataaagcgcgcacccttggccagcggctgaaactcttttcccgcctgcgcctgcgcgatcttttaccggtgccgcctgcagtcgcggaatattcaaccggtctgcggatgggcgacaccgctgagcagatggcgaaaacctggggcatcagccgtgaagatcaggacgcgctggcgctgcgttcacaccagcttgccgcgcgcgcctgggaagagggcaaactgtccagtgaagtgatgacggcctttgtgccgccttatcgcgagccgctggaacaggacaacaatattcgtaaaaattcaaccctggctgattaccaaaaattacgtccggcgttcgatcgtaaacacggtagcgttacggcggcgaatagtacgccgctcaccgacggcgccgccgcggtgatgatgatgacggaatcccgggccaaagagttggggttaacgccgctaggctatctgcgtagttatgctttcaccgctattgatgtctggcaggatatgctgctgggccggcgtgggccaccccgctggcgctggatagagcagggcttaccttagccgacctcacgcttattgatatgcatgaggctttcgccgcgcagacgctggcgaatctacagtgtttagccagcaatcgttttgcccgggacgtgctgggccgtgcgcaggcgaccggggaagtcgatgccagcaagttcaatgtactgggcggttctatcgcctacggacacccttttgcggcgaccggtgcgcgcatgattacacagacattgcatgaactccggcgccgcggcggcggatttggtctggttaccgcctgcgcggcgggtggtttgggttccgctatggtactggaggccgaataatggaagcggcaacagcttttacgcttgaaattcgtccggataatatcgccgttatcaccatcgacgcgcccggcgaaaagatgaataccctgaaagccgagttcggcggcgaggtgcgggcgataatccgccagatccgtgagaataaagcgctgcgcggcgccgtatttatctccgctaaacccgacaactttatcgccggcgccgatatcaacatgattgctcgttgtaccagcgccgcagaagccgaagcgttggcgcgccaggggcagcagattatggccgagatccacgcgctttctatcccggtaattgccgccattcacggcgcctgccttggcggcggcctggagctggcgctagcctgtcatgggcgagtctgtagcgatgatgataaaacgcggctgggattgccggaagtgcagttggggttgctaccaggctccggcggtacccaacgcctgccgcggctgattggcgtcagtacggcgctggaaatgattctcaccggtaaacaattgcgcccgcgtcaggcgctgaaagcgggctggtggacgatgttgtcccacaatcgatattgctggagagcgcggttgagctggcgcgacaaggccggccggcgagccgaactgtgccggtgcgcgaacgggttcttgccgggcctctgggtcgtcagctgctgttccgcatggtggcaaaaaagacccggcaaaaaacgcagggtaattacccggcggcagagcgtattttacaggtgatagaaaacggactggcgtacggttgcagcagcggatataccgaagaggcgcgggcgtttggcgaactggcgatgacgccgcaatcgcaagcgttacgttctattttctttgccagtaccgatctgaaaaaagatcgtggcgccgaggctgaccccgctccgctcaatagcatcggtgtgctaggcggcggtttaatgggggcggtattgcttacgtcaccgcctgtaaaggcggcctgccggtacgcataaaagacattcaggcaaaaggcatcaatcatgcgctcaagtacagttgggatctgctggataagcaggtacgtcgccgctatctgcgcgccagtgaacgcgatcgtcagctggcgctgatttccggcgccacggattatcagggctttgtccatcgcgatgtggtcatcgaagcggtatttgaggatctggcgctgaagcagcggatggttggcgagatcgaacaatgctgcgggccgcagacgatctttgcttctaatacctcatcgctaccgatcggcgagatcgccgctcaggccgttcggccagagaaggtaattggtctgcactttttcagcccggttgaaaaaatgccgctggttgaggttatcccgcacgcaacgaccgatgagcaaaccatcgccacggtggtgaagctggcgaagctgcaggggaaaacgccgatcgtggtcgcggaccgcgctggtttttatgttaaccgtattctggcgccctatatcaatgaagccatgcgcttgttgctggagggcgagccggttgaacatattgataatgcgttggttaaatttggtttcccggttggacctattcagttgctggatgaggttggtatcgataccggcactaagattatcccggtactggagaccgcttttggtgaacgttttaccccgcctgcaaacatcattgacgcgattttgaaggacgatcgcaaaggcagaaaaaataatcgcggtttctatctttatgagacaaaaaggcgtaaaagcaaaaaacgggctgacccggctatttacccattattagcagtggctagcccgcaggcgcgtttgtctgctcagcaggtcgctgaacgctgcgtgatgatgatgctcaacgaggcggcccgctgttttgatgaacagattgtacgcagcgcgcgcgatggcgatatcggcgccgtctttggtataggatttccgccgtttctcggcggcccgttccgctatatggatagcctcggcgtgggtgaagtcgccgcaattttgcagcgtctggccgcacagtacggccctcgtttttctccgtgcgacaccttattacgcatggccgagcagggggcgaccttttggcccactggtgaacggacgacctaagttgtggtcaaaagaaggtaaatccaacgttgactgggctgttaattggcgattttgtaaacaaatattgactatacttacgccaatgaggtaaaaaacagcgtttcattcgttggatggatcaggcacaatgcccggccaccgggtcgcctgcgtattgtttacgcggagcgagttgcggtgattctggttaacaaaagcggtgcaatatgcaagtttttatcatgcgtcacggcgacgctgccctcgatgcagccagtgactccgttcgtcccttaaccgtttgcggttgtgacgaatctcgtcagatggcaacctggctgaaaggtcaaaaagtggatattgagcgggtgcttgtcagcccttacctgcgagcagagcaaactctggacgtggtaggggagtgcatgaacctgccgaaagatgtcgacgtgatgccggaactcacgccgtgcggcgatgtagggatggttagcgcttatcttcaggcgctggcgaatgagggcgtgaaaacggcgctggtcgtttcacacctgcctctggtggggtacctcgtctcagagttgtgcccggggaaacgcccccgatgtttactacctcagcgattgcctgcgtcaccctcgacgccgacggcaagggcgaattcaactggcagatgagcccctgcaatttgagaatggcgaaagccatctaaggctttccaccctcggagcttctgcttacggaagctccggcggcaaccactcttcaacttcaatcagtaccaatagcgcggcatcgccgccgtactcttttggtgcctgatggaacgccataatatgcggatgttgtgccagccacagcggcgtttgctgcttgaggatatgtttgccgtgtccgtgcatcacacaggcgcagaagatatgttcgcggcggcaggcggcaatcagcgcgcctaattcttgtttcgcctgctgctgggttaaaccgtgcagatcgagaaacagctccggcgaatagtcgccgcggcgcagctttttaagctcaaaatggctgacatccgcgcgcacgtacttaatcgcgccttccgtattgagcaacggctgaaactcgtcggaaaaatagtggctgttatccacctgttcctgcagcaatcgcttaggcggaatctcgctgagtttcttgcgctgcgggcggtgtacgattgtgtcctgtttaatttgccgggtgccggtcattagctggcggaacagcgcctgatcctccgcgcttagcggtgttttctttttcattgcccaatctcactatttcttttcggtagtttacccgactcgcccgcgcttcaggcaaggaaaacctatttttccccactccggctgcgcaagaatgctgatttatcgccgccgtcgtggcaaactagccgccgaatttatagcagagcgtgccctggaggattgcgtggataaaatttttgttgatgaagcggtcaatgagctgcagaccattcaggacatgctgcgttgggcggtaagtcgttttagcgccgccaacatctggtacggtcatggtaccgataacccgtgggatgaggccgtacagctggtattaccctcgctgtacctgccgttagatataccggaagatatgcgcaccgcgcgcctgacttccagcgaaaaacatcgtatcgtcgagcgcgtgattcgccgcgtcaatgaacgcattcccgtcgcttacctgaccaacaaagcatggttctgcggacatgaattctatgtcgatgaacgcgtgctggtaccgcgttcgccgattggcgaactgatcaataaccagttcgccgggctgataaaccaaaaaccgcagcatattctcgatatgtgtaccggtagcgcctgtattgccatcgcatgcgcctatgccttcccggaagcggaagtcgacgctgtcgatatctccccagacgcgctggccgttgccgaacataacgttgaagaacatggcctgattaaccaggtaacaccgattcgttccgatctgttccgcgatctgccgaagctgcagtacgatctgattgtgaccaacccgccgtatgttgatgaagaagatatggccgatctgcccgatgagtatgagcatgagccggttctgggtctggcttccggtagcgatggcctgaagctgacgcgccgcattcttggctgcgcgccggattacctcaacgacgacggtattctgatttgtgaagtcggtaacagcatggtacatctgatggagcagtacccggacgtgccgttcacctggcttgagtttgataacggcggtgatggcgtctttatgctgactaaacagcagctcatcgacgcgcgggcgcatttcggcatttataaagactaaaaaaacaacacgcaaacataacgaaaagaatggagccgtgatggcaggaaatacaattggacaactctttcgcgtcaccaccttcggcgaatcgcacggcctggcgctgggttgcatcgtcgacggggtgccgccaggcattccgctgaccgaagctgacctgcagcacgatctggatcgccgtcgccctgggacatcgcgttacaccacccagcgccgcgaaccggaccaggtgaaaatcctttccggcgtctttgaaggcgtgaccaccggtaccagtattggcctgttgattgaaaataccgatcagcgttcccaggactacggtgcgattaaagatctgttccgcccgggtcatgcggattacacctacgagcagaaatatggcctgcgcgattatcgcggcggcggtcgttcgtctgcgcgtgaaaccgcgatgcgcgtggcggccggggcgattgccaaaaaattcctcgcggccaaattcggtattgtgatccgcggctgcctgacgcagatgggtgatattccgctggcgatcaaagactgggatcaggttgagcagaacccgttcttctgcccggatccggataaaattgaggcgctggatgaactgatgcgcggcctgaaaaaagagggcgactctattggcgcgaaagtgaccgtagtagctgacggtgtgccgccgggtctcggcgagccggtgtttgatcgcctggatgccgatattgcccacgcgctgatgagcatcaacgcggtgaaaggggtagaaatcggcgatggttttgaggtggtcaaactgcgcggcagcgaaaaccgcgacgaaatcaccaaagctggcttccagagtaaccacgccggcggcattcttggcggtatcagcagcggccagcaaattgttgctaacatcgcgctgaagccaacctccagtattaccgttcccggtcatacgattaatcgcttcggtgaagaagtcgaaatgatcaccaaagggcgtcacgatccgtgcgtcggcattcgcgcggttccaatcgctgaggccatgctggctatcgtgttaatggatcactttatgcgtcagcgcgcccagaatggcgacgtgacgacatcaattccacgctggtaaccgatgaaaaataccgttatcgcgctgctggcgcttttggccagcaccgccagcctggcggcgacgccgtggcagaaaatatcccagccgattagcggcagcgctcagtctattggcgcgtttgccaatggctgcatcgtcggcgcccagccgctaccgctgaactcccctgattaccaggtgatgcgtaccgatcagcgtcgctacttcggccacccggatctcgtgcagtttattcagcgactgagtttgcaggcgcacaataaaggtatggggacggtgctgattggcgatatgggcatgccagctggcggacgctttaacggcggccacgccagccatcagtcgggtctggatgttgatattttcctgcaattgccgcagacccgctggacctccgcgcaactgctgaaaccacaggcgctggacttagtcgcccgtgatggcaagagggtggtgccgtcgctgtggagcccgcaaatcagcaacctgattaaaatggcggcggaagataacgatgtgacgcgtattttcgtcaacccggctatcaaacagcaattgtgtctggatgccggtaacgatcgccaatggctacgcaaagttcgcccgtggttccagcatcgcgcccatatgcacgtgcgcctgcgctgcccggcgggcagcctcgagtgcgaagatcaagcgccgccgccggctggcgatggctgcggagccgagctgcaaagctggtttgaaccacctaaacctgggtcaaccccacctgtgaagaagacgccgcctccgctgccgccttcctgccaggcgctactggatgagcatcttctctaatggatagttttgtcgaactgtttatggtgtcgccaatggttctggtggcactctttttcgtcgcgattctggccggatttattgattctttagctggcggcggcgggttgttaaccgtcccggcgttgatggcagcgggtatgcccccgctcaggcattggcgaccaacaagctacaggcctgcggcggttccatttctgcgacgctctattttatccgtcgcaaggtggtgaatctcgccgaccagaaactcaatattctgatgacttttatcggctcgacggtgggcgcgctgctcgtgcagcacgtgcagtccgatattttgaagcaaatcctgccgctgctggtgatcggcattgggctgtactttttgctgatgcctaaactcggggaatccgatcgtcagcgtcgcctgtatggcttgccgttcgcgttggtcgctggcggctgtgtgggtttctacgacggcttttttggtcccggcgccggttctttttatgcgctagcctttgtgacgctcgccgggtttaatctcgcgaaatccaccgctcacgccaaactgctaaacgccacctccaatattggcggcctgctgctatttatcattggcggcaaagtgatttgggccaccggttttgtgatgatggccgggcagtttatcggcgctcgcgccggttcgcggctggtgctgagtaaagggcagtcgctgattcggccgatgatcgtcatcgtctccgcggtgatgagcgctaaacttctttacgacagccacggggctgagattttgcagtggttgggaattcactaatgcaacagcaacaccattatcagcagttagtcgagatcttcgacaagtgcttcgccgatgattttaatacccgtctgattaaaggcgacgacgaaccgatctatcttcctgcagatagcgaagtgccatacaaccggatcgtgtttgctcacggcttttacgccagcgcgctgcacgaaatttcccactggtgtatcgccggcaaggcgcggcgagagcaggtggattttggttactggtactgcccggacggccgcgatgcgatgacgcaaagcaagttcgaagacgtcgaggtcaagccacaggcttttgactggttgttctgcacggcggcgggatttccgtttaacgtcagctgcgacaacctcgaaggggactttgagcctgaccgcatcgcctttcaacggcgagtgcatgctcaggtgatgacctatctgcaagaggggatccctgagcgtccggcacgctttattcgcgcgctgcaacagtattatcaaacgccgccgctgacggcagaacaatttccgtggccggaagacctgcactaaagccacgttctacaaatgaaagaggaaagacgatgatcgcggagtttgaatcacgcattctggcgttaattgacgatatggtagaccacgccagtgatgacgaactgtttgctggcggttatctgcgcggccacctgacgctggcggtggctgagctggaaggggaaggggaaggggaacatacggcgcaggcgattaatgataaagtcgccagcagcctggaaaaggccatcaacgcgggcgaactatcgccgccggatcagattctggtgcaagggatgtggaataacctgtaccagcaggcgaaaaatcaggcctgataaatgatgtcatccggatgaggcgttagcctacatccggaaactctcccggtcgcgctgcgcttaccgaggcgactaaaccctgatcgggataaagcgcaaaccggcgttattttactgcttttcccttcagcagttttcttacccacagtcgattcggattcagcgccgccagggtttcactatccagcggtagcggttcttcactcatctgcgcggccagcagttcggcgctcaatggcgcggtgcatagcccacgagatcccaatgccgcgagcataaacagattgtgatagaccggcgcgctgtcgacattttcctgctgttcgtgaagcgtggtgtactgcgtcaacgttttctcataatccggaacgttgcccaccatcggcaggtgatcgcgggtagcgcagcgtacgccgcagcgagcgtcgttgccgctaacatccacctcttttgcccatgccgcctgcgggaaacaatcaatcaggcgctggcgattttgccactgatcttcggcgctgaaatcgatatccgtcttgccgcgatgatagctggcgccaatacagtgttggtgattctctgggttttgcggcgtcagatagccgtcatagcataacacctggcgcagggcggaaagccccggcgtggtggggatatggctaacctggccaccgaccggataagccggtaactgcccggtctgggcaaaatcagtcaggcgatgtccgtttgccagtactaccgcctgatgacgatgctgctgattgaccaaccagccgtcgccctccgcgctgagagtttcgacgggataaccgaagtggctgcgtagtccctgcgtcgccgccagcgacagcaattctgccgtcaactgctgcggacacagccagccgccggcaggataggtgataccgccgcagccggtatcaacgccggtcagttcagcaatctgctccgccgtcaccgcgcaggcgatctccgccggtaaatctgacgccagcatttgggcgattttctgcgtgcttttttcatcccaggcgagttgggttacgccgcaccattgatgatcgaattccactggcaacgcgtcgtaaacgcggcgcgcgaaagtaaacgccgccggaaaaaagcgcgccagagaagggtcgtgctggcttaatagcggatacagcgcgccctgacgattgccggatgcgcctctggcgggcgcatcgtcagcgcagtacaacgtcacctgccagccgcggcgcagcagcgccagcgagagtagggcgctggcgataccgccgccgattaccgccgcttcgcgcgattgactaccgctgcgggcaaaccatggcgtccgcgacagcgtcggaacgtcggcggtcaattcgccgattagcatttctcgcttgcggccaaagcctttgcgtttttgcatgctaaagccggcttcctgcagcccgcggcgcacgaagccagcggaggtaaaggtcgccagcgtgcagccggggcgggccaggcgcgccatggcggaaaacagccccggcgtccacatatccgggtttttcgccggcgcgaagccgtcgaggaaccaggcgtcgacctggcggttgagtgaatcgtcaagctggtcggtgagcgtgttgatatcgccaaaccataagtccagcgtaacgcggccatcgtcgagcagcaggcggtggcagcccgcgactggcagcggccactgcgcctgtagctgttcagcccatggcgccagttccggccagtgctggtgcgccaggcgcagatcgtcggccttcaggggaaatttttcaaaactgatgaaatgtaatctttgcagcgtagcctgcggattatcgcggcgaaaaacagcaaacgcctgccacagcgtcaggaaattgagcccggtgccgaagccgctctccgcgacgataaacagcgggcgcgggtgggttggaaaacggctatcaagctggttgccgttgagaaaaacgtagcgcgtctcttccagaccgttgtcattagaaaaataaacgtcgtcaaaatctcgggaaacaggtgtaccctcagcgttgaattccaggttggcaggttgtatggcgttttgtttcacgtaagttactcgaatcacaaggcgtagcgcgatcttaacgatgtgtgccagaaggcgcaaatttatacacaaaatggctgatcggacttgttcggcgtacaagtgtacgctattgtgcgactcgaaacttaaaatagtgcgacttacagaggtattgaatgaaacgtgcagtgattactggcttgggcatcgtttccagcatcggtaataaccagcaggaagtcctggcatctctgcgtgaaggacgttcagggatcactttctctcaggagctgaaggattcaggaatgcgtagccacgtatggggcaacgtcaaactggataccacgggcctcattgaccgcaaagtagttcgctttatgagcgatgcatccatctatgcttatctgtccatggagcaggcggtagccgacgcaggtctggcaccggaagcataccagaacaacccgcgtgtcggcctgattgcaggctccggcggcggctccccgaaattccaggtcttcggcgccgatgccatgcgtagcccgcgtggtctgaaagccgtgggcccatacgttgtgactaaagcgatggcttctggcgtatccgcctgcctcgccacgccgtttaaaatccacggcgtcaactactctatcagctccgcttgcgccacttccgcacactgcatcggtaacgcggtagaacagattcagttgggcaaacaggacatcgtctttgccggcggcggcgaagagctgtgctgggaaatggcttgcgaattcgacgccatgggcgcgctgtccaccaaatacaacgattctccggacaaagcgtcccgtacctatgatgcgaaccgcgacggtttcgttatcgctggcggcggtggcatggtcgtggtggaagagctggaacacgcgctggcgcgcggcgcgcatatctatgcggaaatcgtcggttacggcgcgacttccgatggcgcggacatggttgctccatctggtgaaggcgcagtgcgctgcatgcagatggcgatgcacggcgttgataccccgatcgactacctgaactcccacggcacttctactccggtaggcgacgtgaaagagttgggcgctatccgcgaagtcttcggcgacaacagcccggctatctctgccaccaaagcgatgaccggccactctctgggcgccgcaggcgtacaggaagccatctactctctgctgatgctggagcacggttttatcgcgccaagcatcaacatcgaagagatggacgagcaggctgccggccttaacatcgtcaccaaaccgaccgatgctcagctgaccaccgtaatgtccaacagcttcggcttcggcggcaccaacgcgaccctggttatgcgtaaatacaacgcctaattggttagagtcagtaccaggggagcccgaggctcccctttttttgacgtcttgacagcgcctggcgagagcaggcaaattgctcgccatcattctcattccagcttctcgccttgctctgcaaaactggggtaacgcatgtccgcagcgacaaaaacgttaaacaacgcttcagagaatctctcgctatttcgcattacctttgcggtttttttgacctatatgaccgtggggttgccgctaccggttatcccgctatttgtgcaccacgatctcggttttggcaacactctcgtcggcgtggccgtcggcatccagtttctcgccacggtcttaacccgcggctatgccgggagactggccgatcagtacggcgcgaaacgctcggtgctgcaaggaatgttggcctgtgctctggctggctgcgcctggctagcggcggcgctgttgccggtgccggtaatggccaaatttggcctgctggtgctgggacgtttgattctcggctttggtgaaagccaactgctgaccggcaatttaagctggggattagggctggttggcccgcggcgttccggtaaagtgatgtcgtggaacggcatggcgatgtacggggcgctggcggtgggcgcgccgctggggctgctgatttacagccgcttcggcgtggcgacgctggcctgcgtcacgatggcgctgccgctgctggcgtgggcgattaacggcacggtccgtaaagttcccgcccacggcggcgaacgtccttcactatggagcgtcatcggcatgatctggcggccgggattggtctcggcctgcagggcgtcggctttgcggtgatcggcacttttgtttcactctatttcgccagccacggctgggcgatggccggcttcacgttgaccgcgtttggcggcgcttttgtcctgatgcgtattctgttcggctggatgccggatcgctttggcggcattaaggtggcgatggtatcgctgctgattgaagcgatcggtctgacgctgctatggcaagcgccgggcgcctgggtggcgctggcgggcgccgctttgaccggctgcggttgctcgctcatcttcccggcgctgggcgttgaagtagtcaaacgggttccggctcaggttcgcggcaccgcgcttggcggctatgccgcgtttcaggatatctcttacggcgtcactggcccgctggctggcctgcttgccacctcgcttggctatgcttccgtgttccttgccggggcgatttgcgcggtattggggattgcggtcactctgttgacgctacgtaaataaatacataacggcggctatcaggccgccgttattgctttaggcttacagcaccagccacagcagaataatcaccaccagcagggcaatcgccaccgtccacacttttttgctatacaccgcatggggtgcgggcagcggctcgaccggggtaattgccattgtcgcctgggcgcgggctacgcgtaacgcaaagactttatttaatagcgttagcacctgcgggctggttaaggtcgtcgtgggcgtcacctgccagttgctttgcgcgaaatcggcgattttctgccactcctgcgcctccaatggttgcttaagcgctgcctgcagcgaattcatcgtcggcgcggtttgcgcgctcagcgtttgtcgcgcctgcagccagtacgagagcggggtgaagtgggtggcggggatcagttcgccggatttcacgccgcacagttcaagcattgattgccagataagcttgctcgattcgccggttgcggcggccagtttggtcactaactggttcagggtgttatgttccgccggcagcaaaggacgcagcgttggcgtccgctgttgcggttgcgggatcgccaactggccgttttgcagcagatgcagcacgttctccagttgcgcctgcgtcagcgcgtgcagcacggtttgaccgtaattctggcggatataatcgctcaccgcctgacggttattcccctgggtcagcagttcgctgagctgggcgagaatttgccgatggtggtggttttgctgagcgatacttaagcgctgattcaggttgctctcagccgcgctgaaatggctcgccagcaacggcgtgtcgcctttcagacccagatcgtgcttcacgcaggcccacacttcggcgttttgctgcgatgtcagcgtcaccagacgcgttatcagccgctccagaacggtgcgttgctgcatggtgagcgcgtttggacccacggcggatgcgccggatgggccagtccccggagggcgatcggacatacctgaaacgggtggtgtcatgatgaatccttaccgtagtgctgtacttaagccgggtgatgatgttcctggcggccagattatggcacacttccccggtttactctcgttctcagacaggtactgaaccgtgaaaatcctcgttgatgaaaatatgccctatgcgcgtgagctttttagccgtttgggagacgtgcaggccgttcccggtcgtcccattccgcaggaagcgttgaccgacgccgacgcgctgatggtgcgttccgtcactaaggtgaatgaagcgctgctctccggtaaggcaattaaatttgtcggcaccgccaccgcaggcaccgatcatgtcgatcaagcgtggttacagcaggcggggattggcttttccgccgcgccgggctgtaatgcgatcgcggtggtggagtatgttttctcggcgctgctgatgctagccgagcgcgatggattcgcactggctgatcgtaccgtcggtatcgtcggcgtcggcaacgttggcgggcgtttgcaaaaacgtctggaagcgctgggaattaaaacattactctgcgatccgccgcgcgccgatcgtggcgatgaaggcgacttccgcagcctggacgagctggtgcagcaggcggatgtcctgactttccacacgccgttgtttaaagacgggccgtataaaacgctgcatttggccgatgaagcgctgattagccgcctgcagccgggggcgatcctgattaacgcctgccgtggcccggtagtggataacgcggcgctgctcaagcgcttgcaggccgggcagcagctgagcgtggtgctggacgtctgggaacccgaaccggatctgaataccgagttgctggcgcgtgtcgatatcggtacctcgcatatcgccggttatacccttgaaggcaaagcgcgcggcaccacccaggtttttgaagcctatagcgcgtttattggccatccgcagcaggtggcgctggatacgctactgccggcgccggaatttggccgcatcactctgcacggcccgctcgatcaggcgacgctgaaaaggctggtccatttggtgtatgatgtgcgccgcgatgatgcgccgctgcgtaaagtggcaggcattgccggtgaattcgacaagctgcgcaaaaattatcaggaacgccgcgaatggtcttccctgtacgtacagtgcagcgatgaaaaagcagcgacgctgctgcgtcagctcggttttaatgccgtacatcatcctgttcgttaatatcttcttaatgcccctgtcggataatccggcagggtcgctattttctggagtacaccaccatgtctgaaggctggaatattgccgtactgggcgcaaccggcgccgtaggcgaagccctgcttgaaacccttgctgaacgccagtttccggtaggcgaaatttatgcgctggcgcgcaatgaaagcgcgggcgaacatctgcgttatggtggcaaatcggtcatcgtgcaggacgccgccgactttgactggacccaggcccagttggctttcttcgccgcgggcgtcgaagccagtgcggcgtatgtcgaagaagccaccaacgccggttgtctggttatcgatcttagcggcctgtttgcgctggagccggatgtgccgctggtggtgccggacgtcaacccgttcgtgctcggcgactaccgcaaccgtaacgtgattgcggtaccaaacagcctgaccagccaactgcttacggcgctgaagccgctgattgatgatggcggcctgtcgcgtattaccgttaccaacctgctgtctgcctcggcgcaggggaaaaaagcggtcgatgcgctggcggggcagagcgcgaaactgctgaacggtattccgattgatgaagacgatttctttgggcgccagctggctttcaacatgctgccgatcctgccggatcgtgaaggtagcgtgcgcgaagaacgacgtatcgtcgatgaagcgcgcaaaattctgcaggatgacggcctgatgatttccgcgagcgtcgtgcaatcgccggtcttctatggccatgcgcagatggtgaattttgaagccttgcgtccgctggcggcggaggaggcgcgcgacgcctttacccgcggcgaggatatcgagctttccgaagagggcgaattcccgacgcaggtcggcgatgcttccggaaacgcgcgtctgtccatcggttgcgtgcataacgattacggcatgcccgagcagattcagttctggtcggtggccgataacgtgcgctttggcggcgcgctgatggcggtgaaaatcgccgagaagctggttcaggagtatttgtactgatgtctgaagcacagcagcagccggtgtataaaatcgcgctgggcatcgagtacgacggcagcaaatactacggctggcagcggcaaaacgaagtgcgcagcgtgcaggaaaagctggaaaaggcgctgtcgcaggtggcggccgaaccggtacacgtattctgcgccgggcgtaccgacgccggcgtacacggtaccggccaggtggtgcactttgaaacccgcgcccagcgtaaagacgccgcgtggacgctgggcgtaaatgcgaatttacctggtgacatcgccgtgcgttgggtgaagcatgttgcggacgattttcatgcccgcttcagcgcgacggcccgacgttaccgctacgtcatctataatcaccgcctgcgcccggcggtgttaagccagggggtgacgcattattaccaccctctggatgccgggcggatgcatcgcgccgcgcagtgtttgattggcgagaatgacttcacctcgtttcgcgcggtgcaatgtcagtcgcgcacgccgtggcgtaacgtgatgcatatcaacgtgacccgtcacggggcttatgtggtggtggatatcaaagcgaacgcttttgttcatcatatggtaaggaacatcgtcggcagcctgatggaagtaggcgccggaaaccagccagagagctggattgcagaactgctggcggcgaaggaccggactctggctgccgcgacggcgaaagcggaaggattgtatctggtgtcggtggattatccggcccatttcgatctgccggtaatgccgatgggcccgctatttttggcggactaatatcagcgcccccgtaacaggggcggttgtcactaaaggctaagacaaatatggacctgattcattttttgattgatttcatcctgcatattgatgtgcaccttgcggagctggtcgcacagtatggcgtctgggtttacgccatactgttcttgattctgttctgcgaaaccggcctggtggtgacgcctttcctgcccggagattctctgctgttcgtcgccggcgcgctctccgcgctgccaactaacgatctcaacgtacatctgatggtcgcgctgatggtcattgccgccgttgttggtgatgccctgaactacaccatcggtagattgttcggcgaaaagctcttcagcaatccgaactcgaagattttccgtcgtagctatctcgacaaaacccataccttctatgaacgccacggcggcaaaaccatcatcctcgcgcgttttgtgccgatcgtcagaacctttgcgccgtttgtggcgggaatgggtcacatgtcctatcgtcattttgcggcgtacaacgtggttggcgcgctgctgtgggtactgctgttcacctacgccgggtacctgttcggtgatttaccgatcgtacaggaaaacctgaaactgctgatcgtggcgattatcgtcctgtcggtactgcctggtgttatcgaagtgattcgccatcgtcgggcggcggcaaagcaggctaaataagcctttagcggcattctcgccgggcgttgctatgacgtccggcgcgcaaagtgtgagcggttcgaccacttttttatcccatgttacgggatgttatgatttaatgtgcaacattcatggtctgtgagggcaaaagtggcattatgcgccccttgcgacaaaactggcatcgaccaggttcaggtagaaaggttatcaatgagctggattgaacgaattaaaagcaatataaccccacccgtaaggcaagtattcctgaaggtgtatggaccaagtgcgacagctgcggtcaggtactgtaccgcgcagagctggagcgcaacctggaggtttgccctaagtgcgatcaccacatgcgtatgtcggcgcgcaaccgcctgcatagcctgctggacgaaggttctctcgtggagctgggtagcgagctcgagccaaaggatgtgctgaagttccgcgattcgaaaaagtataaagaccgcctggcctctgcacagaaagagaccggcgagaaagacgcgctggtggtgatgaaaggcaccctgcacggcatgcctgtcgtggcggcggcatttgaattcgcctttatgggcggttcgatgggttccgttgttggcgcgcgtttcgtccgtgcggttgagcaggcgctggaagacaactgcccgctgatctgcttctccgcctctggcggcgcccgtatgcaggaagcgctgatgtcgctgatgcagatggcgaagacctccgcggcgctggcgaaaatgcaggagcgcggtttaccctatatctccgtgctgaccgacccgaccatgggcggcgtctccgcgagcttcgcgatgctgggcgatcttaatatcgccgagccgaaagcgctgattggcttcgccggtcctcgcgttatcgagcagaccgtgcgcgagaagctgccgccgggattccagcgcagtgagttcctgattgaaaaaggggcgatcgacatgattatccgtcgtcctgaaatgcgtctgaaattagccagcatcctggcgaaactgatgaaccttccttcgccgcaggccgatgcgcctcacgagggcgaggtggtaccaccggtaccggatcaggaaccagaggcctgataatgcagagggcagggccgacaggcgctgcccttttttttaccgttaactctcgcggacatcatggaaaaagatcctattcctcaggccacgtcgcccctggctacgtggctttcttatctggagcatctgcacagtaaagccatcgatctgggactggcgcgggtgagcgaagtcgccggacggatggcgatattaaaaccggcgccgtttgtctttacagtggccggtaccaatggcaaaggcaccacctgccggacgctggaatccgtgctgatggcggcgggttataaagttggcgtgtatagctcgccgcatctggtgcgctataccgaacgcgtgcgtatccagggcgctgagctgccggaagcggcgcataccgcctcatttgccgaaatcgaagcggcgcgcggcgatatctcgctgagctattttgaatttggcacgctgtccgcgctatggctgtttaagcaggcgcagctggatgtggttatcctggaggtgggtctgggtggacgcctggacgccacgaatatcgtcgatgccgacgtcgcggtggtcaccagcatcgcgctggaccataccgactggctggggccggatcgtgaaagcattggccgtgaaaaagcgggtatcttccgcgccggcaaaccggcggtggtgggcgaacccgatatgccgcatacgattgccgacgtggcgaatgaaaaaggcgcgacgctgctgcgccgcgaccatgactggcgttatagcgtggcagaccagtcgtggagttttcgtgatggtcagggcgaactgaatggattgccgttgccgcaggttcctttgccgaacgccgcgacggcactggcggcgctgcgcgcaagcgggcttaacgtcgctgaacaggcgctgcgcgacggcattcatcgcgccatgctcccgggccgctttcagattattagcgaggcgccgcgggtgatcctcgatgtcgcgcataacccgcacgcggcggcttatctcgccgggcgtctcaaaaccttagcgaaaacggggcgcgtactggcggttattggtatgctgcatgataaagatatcgccggaaccctggcgaatctggcgcctgaggtagatgcgtggtactgcgcgccgctggaagggccgcgcggtgccacggcggaccagctgattgcgcatctgcgcgcgggccaacgttatgacagcgtagcccaggcgtggcatgccgctatggcggatgcaaaagccgaagatacggtgctggtgtgtggttccttccacacggtagcgcatgtaatggaagagatagacgcgggagaatcggtggcgagtaagtttcagaaccgtttagtcgggacgattgtactggtagcgctgggggtaattattctcccgggtctgctcgacggtcagaaaaaacattatcaggatgagtttgcggcgatcccgttagtgccgaagccgggcgatcgcgatgagccggatatgctgccagcggctacccaggcgctgccttcgcagccgccggaaggcgccgcggaagaggtgagagcgggagacgccgcggcgccgtcgctggatccgtcgcgcatcccggtaaataacaatagcttcgatgaagttcaggagccggtggtggccgctaagccgcagccgaaaccacagccgaagccggttgagaaaccgcaaccgcagcaggtcgtgcagacgccgcctccggccaaaacgcaaccacagccgcaacagcagcaggccgctattccggcaccgaccggaaaagcctatgtggtgcagttaggggcgttgaagaatgccgataaggttaacgaaatcgtgggtaagctgcgttcctcgggctttaaagcctggacatcgccatccacgccggttcagggtaaaattacccgtattctggtggggccggatgcgtcgaaagacaagctgaagggcaactcggcgagctgcagcagatttctggcctgagcggcgtggtcatggggtatagcccgaattaaaaaccacatccgctctgattgggcgagctggcaggcgggttaacctgctgaaacccttgccggatacgccctgaagaggcgtcaggcagtatggcgttgaatgttttttcagcgccatttttatttctgtagggcacggaaatccctacgcaaacgttttctttttctgttagaatgcgcccgaactggacgacagggcgtaaaatcgtgggatgtatatggtctggattgattacgccattattgcggtaattggtttttcctgtttggttagccttatccgcggctttgttcgtgaagcgttatcgctggtgacatggggatgtgccttctttgtcgccagtcattactacacttacctggctgtctggttcacggctttgaagacgaactggtccgaaatgggattgctatcgcgatattgtttatcgcaacgctcatcgtcggcgctatcgttaactatgtgataggcgctctggtagagaaaaccggtctgtcaggaacagacagggtgttggggatctgttttggcgccctgcgcggcgtgctgatagtctccgctattctgttctttctcgatagcttcaccggtatggcaaaaagtgaagactggcaaaagtctgagcttatcccgcagttcagtttcgttatcagatggttctttgactatctgcagagctcgtcaagtttcttgcccaaagcataagcgttgggatgtagcttaacgaggaaaagacgtatgtgcggtattgtcggtatcgccggtgttatgccggtaaaccagtcgatttatgacgcgttaacggtgcttcagcatcgtgggcaggatgccgcgggcatcatcaccattgatgcaaataactgcttccgtttgcgtaaagccaacggactggtgagcgatgtgttcgaagcgcgccacatgcagcgtatgcagggaaatatggggattggccacgtccgttacccaacggcaggcagttccagcgcttctgaagcgcagcctttttacgttaactcgccctacggcattacgttggcccataatggcaacctgaccaatgcccacgagctgcgtcaaaagctgtttgaagaaaaacgccgccacatcaacaccacctccgattccgaaattctcctcaatatcttcgccagcgagctggataatttccggcattacccgctggaagccgataacattttcgccgcaattgccgcgacgaaccgccagatccgcggcgcatacgcctgcgtggcgatgattatcggccacggcatggttgccttccgcgacccgaacggtattcgtccgctggtgctcggcaagcgcgatatcggcgatggccgcaccgagtatatggtcgcctccgaaagcgtggcgctggataccctgggctttgaatttctgcgcgacgtcgcgccgggcgaagcggtctacatcaccgagaaaggccagctgtttacccgccagtgcgcggaaaacccggtcagcaacccatgcctgttcgaatacgtctatttcgcgcgtccggactcctttatcgacaagatttccgtctatagcgcccgcgtgaacatgggcacgaagcttggcgagaaaattgcccgcgagtgggaagatctggatatcgatgtcgttattccgatcccggaaacctcctgcgatatcgccctggagattgcccgtatcctcgataaaccctaccgtcagggcttcgtcaaaaaccgctatgttggtcgtacctttatcatgccgggccagcagctgcgccgtaaatccgtgcgccgtaagctgaacgccaaccgcgccgaattccgtgataagaacgtgctgctggtggatgactctatcgttcgcggcactacctctgaacagattatcgaaatggcgcgcgaagctggcgcgaagaaagtgtatctggcctccgcggcgccggaaattcgcttccctaacgtttacggtatcgatatgccgaccgccaacgagcttatcgcccacggccgcgaagttgacgagatccgtcagatcatcggcgccgatggcctgattttccaggatctgaacgatctcattgaagcggttcgcgccgaaaacccggatattcagcagttcgagtgttcggtctttaacggcgtgtacgtcaccaaagacgttgaccaacagtatctcgattatcttgattccctgcgcaacgacgatgcgaaagcggtccaactgcaaaccgaagttgaaaacttagagatgcataacgaaggctaattcgttccttgtcgctggcccgccgtctttcgaggaccgcgggcctttttatttttacccgccaggttgcgtcggggactataatccggcaaagtctgcggcactatgcgcaaggggtataacatcgtgaaacgactcattatcggcatttccggcgccagcggcgcgatttacggcgtacgcctgctacaggtattgcgtgacgtcgcggaggtcgaaacccatctgataatgagccaggcggcgcgtcagacgctgtcgctggaaaccgactactcgttgcgggaagtgcaggcgctggccgatgtggtacacgacgcgcgcgatatcgccgccagcatctcctccggctcgtttaaaaccagcgggatggttattctaccgtgctccatgaaaacgctctccggcatcgtcaatagctataccgatggtctactgacccgcgcagcggacgtggtgttaaaagagcgccgcccgctggtgctttgcgtacgcgagacaccgttccaccttgggcatctgcgtttaatggtgcaggcggcggaaatgggcgcggtgattatgccgccggtgccggccttctatcatcgccccagtcgctggatgatgtgattaatcagacggttaatcgggtgatcgatcagtttgatattgacctgccgcaggacttgtttacccgctggcagggcggggcctgatgcacctgtttggtgcattttatttacctttgccttccactggtgcatttttgttgtcctgatcaaatcctcgacatttaatttgtttttttgcgttttgccgctgcggtttatccgccaatgctggtatcttcccttctaagacaatcttgcaactttatattaacaaatttaacgctattcccggcacgcaccgggataatggcataaaacctgcaagaaccgtcggcaacatacataaccagacagcgcacaacataacaacatcacgacacttaagggctttctatgaaaaagacgatcctggctctctcgttaatcatgggaatcagcagcgccgccagcgtatctgcggcgctgccgcaaagtatccgcatcggcaccgataccacctatgcgcctttctcgtcgaaggattcgaagggcaactttattggctttgacatcgatctgggcaatgaactgtgctcgcgtatcaaggtgaaatgcacctgggtgggcagcgattttgacgcgctgatcccctcgctgaaagcgaagaaaatcgacgcgattatctcgtcgctatcgattaccgaaaaacgacagcaggagattgcgttctctgacaagctgtacgcagcagactctcgactgattgccgcaaaaggctcgccgattcagccgacgctggagtcgctgaaaggcaagcatgttggcgtactgcagggttccacccaggaggcctatgccaacgaacgctggcgcagtcagggcgtggatgttgtcgcctatgccaaccaggatctcatctattccgacctcgccgcagggcgtctcgacgcggcgctgcaggatgaagtcgcggccagtgaaggtttcctcaaacaacctgccggtaaagattacgcgtttgccggcccttccgttaaagacaaaaaatactttggcgatggtaccggcatcggcttgcgcaaagaagatggcgagctgaaaaccgctttcgacaaagcgctgggtgaaatgcgtaaagacggcacctacgacaaaatggcgaagaagtacttcaactttaacgtctacggcgattaagactgtagcggtctggttatgccaggccgttccattgcgacgcggttattgttgcccttgataggtgcaagcggttgacggcttgcaccagaatggggcgacagcagttttctttgttcataaaatgcatagttaagcgtttctgatgcaaaaaaatctgcttccatgcgcattttgctttgccttggcagggcgaataatggcacgataactggcgtaagtgcttctaataaacccgttagaatgacagtctgttgaggataattatgaaaaaactggcgttgtctctttctttggcgctggccctttccagcgtttccacggtattcgcagccattccacagaaaatccgtattggtaccgatcctacttatgcgccgttcgaatcgaagaatgcgcaggggcaattgatcggttttgacatcgatctggcgaaagagctgtgtaagcgtattaatacccaatgtaccttcgttgaaaacccgctggatgcgctgatcccctcgttaaaagcgaagaaaatcgatgcgattatgtcctcgctgtcgatcactgaaaagcgccagcaggaaattgctttcaccgacaaactttatgccgctgactcccgtttggtggtgaaaaagggcagcgatattacgccagacctgagcaagctaaaaggcaagcgcattggcgtgctgcagggcacgactcaggaaacctatggcaatgagcactgggcgccgaaaggcattgaaattgtctcctatcagggccaggacaatatctattccgacctgaccgcaggccgtattgacgccgcgttccaggatgaggtcgcagccagcgaaggcttcctcaaacagccgattggcaaagattatcagtttggcggcccgtcgattaaggatgagaagttgtttggcgtcggtaccggcatgggcctgcgtaaagacgacaccgagctgcgtgaggcgctaaataaagctttcgccgagatgcgtaaagacggcacttacgacaagctggcgaagaaatatttcgactttaacgtgtacggcgactaatcatcgttagtacctcgccgcacgcgttttcacgtgcggcgatcgatgacagacagggcagacagcatgctgtacgggttctcacaggttatttttcagggcgcgctggtcacccttgagctggcgcttagctcggtggtgctcgcggtccttatcgggctggtgggcgcgggggcgaaattatccgccaaccggcctatggcgctggtgtttgaaggctataccacgctgatccgcgggtgccggatctggtgctgatgctgctgattttctatgggctacagatcgctcttaacagcatcaccgatgcattaggcatggcgcaatttgatattgatccgatgattgccggtattatcacccttggctttatctatggcgcctacttcaccgaaaccttccgcggtgcgtttctggcggtaccgaaaggccatattgaagcggcgacggcatttggcttcagcggctggcagacgttccgccgcatcctgtttccggcgatgatgcgctatgcgctgcccggtatcggcaacaactggcaggtcattctcaaagccactgcgctggtgtcgctgctcggtctggaagacgtggtgaaggcaacgcagctggcgggcaaaagcacctggcagccgttctatttcgctatcgtctgcggggcgatctatctggtgtttaccacgatttccaatggtgtgttgctgctgcttgaacgccgctactccgtgggtgtgaagagggctgacctgtgattgaaattattcaggagtactggaaatccctgctgtggaccgacggttaccgttttaccggtgtggcgatcaccctgtggctgctgattgcttcagtggtgatgggcggtatccttgcggtgtttctcgccatcgggcgcgtatcgagcaataaatacattcagtttccgatctggctgtttacctatattttccgcgggacgccgctgtacgtgcagctgctggtgttttactccgggatgtatacgctggaaatcgtcaaaggcagcgatctgttgaatgcgtttttccgcagcggcctgaactgtacggtgttggcattgaccttaaatacctgcgcctacaccaccgagatttttgcgggggcgattcgttcggtggcgccgggcgagattgaggctgcgcgggcttacggcttttcttcagttaagctgtaccgctgcattattttgccctctgcgctacgtattgcgttaccggcgtacagcaacgaagtcattctgatgctgcactcgacggcgctggcgtttaccgccacggtgccggatttgctgaaaattgcgcgtgatattaactcggcgacctatcagccgtttaccgctttcggtatcgccgcggtactgtacttaattatttcgtatgtgctgattagcttgttccgcaaggcggaaaagcgctggttgcagcatatcaaaccttcttcgacgcactgagaaagccatgaccgacaataaattaagcgttatcgatctgcataaacgttacggcgagcacgaggtgctgaaaggcgtctcgctgaaagcgaaggccggagacgtgattagtattatcggctcatcgggttccggtaaaagtacctttctgcgctgcatcaactttctggagaagccaagcgaaggaacgattatcgtcaatgggcagaatattggcctggtgcgcgataaagacggccagttgaaggtagcggataaaaaccagttgcgcctgctgcgcacgcgcctgacgatggtgttccagcacttcaacctgtggagccacatgacggtactggaaaacgttatggaggcgccgattcaggtgctcggcctcaacaaacaggaagcgcgcgatcgggcggtgaagtatctggcgaaagtcggtatcgatgaacgccagcagatcaaatatcccgtacatctttccggcggtcagcagcagcgcgtatccatcgcgcgggcgctggcgatggagccggacgtactgttgtttgatgagccgacatcggcactggatccggagttggtgggcgaagtgttgcgtattatgcaaaaactggcggaagaggggaaaaccatggtggtcgtcacccacgaaatgggctttgcccgccacgtctcttcacacgtgattttcctccatcagggaaggatcgaagaagaggggcatcccgacgagctattcggcaacccgaaaagccagcgcctgcagcagttcctcaaaggttcactgaagtaagcgccttttcccggcgggtttgctcgccgggaatgacttaacgctccagccggtagatccaatcatcgtaatccacgccgttgaggtggtaagcattttccagaacctgaatgcgtacaaaaccctgcttttccagcagccgcgacgaccccaggttatctcccagcacccaggcattaatggcgtggatgccaagggtggtaaagccgtaatcacaaatcgcgcgcagcgcttcgctggcgtagccctgaccctgcgcttgcggcagtagcgcgtagccgacatcggcctcgtggggatttttcgtactgatgcgcagaccaatatctcccagcggcgtgccgacagaatcgcgcaacacaaagacgccggcatcttggcagcggcattcaaacacgctgcgtagcgccgtttcgcttaacagctcccccatgtaacgcatgacgtcaggatcctgacgcagacgcagaaaaaagggccaatcggccggagtgaagcgggaaagcaacaggcggggcgttgttatcgtagtcataaagtagtgaatcagctaaaacgaaagcctactttaccaccatgctgcgccgggtaacatgctcgccctcgcgaatcagcctgtgggtggcgtggcgctcagcctttgcaggtagcgctgcacgcggtgattttccggtgaacggcgaagctgtagcgccaggttgaggctatccagcagtagggcgttagccaccatcggcgaatcggcggcgatgcgcttttccgcgactaaccattcaacgacggatttccagcgccagagaggggaattgcctttcacgcgctgtacggggccgggaaaccgcccgctgccgcgagctccctcttttaatagagcgatcgcctggcgggagacgccgataagttcggcgatatcgctcagcccgaccaatgtcgaatcgatggactccacgcggatatctggcagcgcggcggtttctacatcgcggatggcggatagcgccgcctgctccagcgattggccctcgcgatcgaactcgaggtagaccgcagtaccgtaaaagcagaccagcgcgtcgctacagcctgcggcaaagagcgcatcttccagtcctggcgtttgactggtgacgccggacagcgtcagcgtaaaattaaatatcggcatcgtttagcgttccttatgcatggtgcgcgcggtagccgggatgggacaccgttcgaccattctgattatttgccgggcgtggttttcagggacggcgggcgtcgaccaaatgctcatcatatgttcacggtgttcagccacgccgcagacgaggcggccaaagcaatgagcgcttttacctgcaggcagcaatatccacccccgcgccagcgccgtagcaatcgccttcctgatatgtttgtccggatgttccttcatcgtcaaatcctgctcagaataaaaagagtgttgacggttgtcaacgatttttgagggtatattcctcgtcaggacgttatggcaggagaataattttgcggttggaatgggcttcacaagaagcgtagcaaggagagcgaggaattaacgatttgcgaggcggcttccgccccagggaagagaacggggagccgttgctccccgtttatcgacttagctcaacacatccttcagagcctcttccagatcgtaccagcggaagctaaagccggtggcttccaggcgtttcggcagcgcccgctggccgccgagcaccagtactgaggattctcccatcagcaggcgaatggcggcggcgggaacgcggaaaatcgccgggcgattgagcgcgtggccgagcgcgtgggcaaactgttcgttacgcacaggatagggcgagaccatattgaatgggccgcgcagatcgttatccagcagccacagaataccgttcaccatatcatcgatatggatccacgccagatactggcgaccgtcgccgattgggccgcccagaccgagcttaaacgcgggcgtcattttggccaggatcccgccccgcggcgctaagacgacgccggtgcgcaacaggcacacgcgcgtgcgatcgctttgcgcctcacaggcgatttgctcccagcgggcgcaaagtttatgggtaaattcgttgtgcggcggctcttcctcggtcaccacgacttcaccgaggtcgccgtaatagccggtagcggaaccgctaatcagcactgaaggaggtgtttcgctggctttaaataacgcgaccagttgccgggtgaggtcccaacgactgtgacacaggcgctctttttgctctgccgtccagcgcttatcggcgatcggttcaccggcgagattgatgacggcgtcaaagccatcgaggttgttttgcccctcgaaaccgcgccacagcgtgacgcggggatcgagacgggctttcgcacgttcagggttgcgggtagaaatcgtgagctggtgccctggttccagcagcctgggaataagatgccgaccaatgagcccggtaccgccagtgagcaggattttcataccgcctccctaacaaacgttttagcgccgccagctcatggtcatcgatactgagtcggcataacgcagcgcgtgaagtttatcgatctctacttcagcataagtgacccagtgatgttcgcatgcgatattgagcacatcctgggttaatttttccagcagcgagaagcggttattctcgatatggctgatgatgcgcttagtaatagtgcgatagttgagggcatcattaatatcttcgctgtcgcgagccttatcggccggatagtgaatcaccacattcaccaatacatcctgacggttggcgatctcttcctctttgattccaataaaagtacgcaggcgcaggttcttaatacgaataatggcgtctggctgagacattgcaggcttcctccgtgtagtaatttccgcaatcatacatgaaagcacgccctgcgagcaggggattaatactgttgtgttttgagtagcgcttgttgtgttgccgggcgctggcggatgcgttcaaaccagttatgtaccgccgggaactggctaagatcgatgcgttggcgtgggtgggcattaatccatggccagcaggcgatatcggcgatactgtagtgctcgccgcccaaccatggactggcttcaagacgccggttcattacgccatagagccgctggctttcgacctgatagcgttcaatggcgtaggggacagcctgaggcgcgtgatggttgaagtgatggttttgcccaagcattggccccagaccgccaacctgccagaacagccattgcagggtggtatgccgttcgcgcagctcgccgcttagtaattttcccgatttctccgccagatagagcaggatctctccggactcaaacaggcttaacggcgcgccgccgtcgaccggaacgtggtcaacgatcgccgggatcttattatttggcgagatagtcagaaactgcgggcgaaactgttcacctttgccgatatcgacgcgtatcaggcgataggccagttgcgcctcttccagaaaaagagtgattttgtggccgttgggggtaggtgcgtagtaaagatcgatcatgaggtctcccgccatcgaaggtcgcaaacgtttcgagtataggcgacctgcgtaatcgcggggcaaagaatataattgcgaaatcctcatacggctgccagtgacatcttatagcagaccagctatgttgatttatctcccctggcttcattgaggatgttatgaatcagcctgttattaccctgtggtccgatgccgattttttctcccctatgtgatgtccgtgtacgtggcgctgcaggaaaaaagcctgccgttcacccttaagaccgtcaatctcgacagcggcgagcatctgcagccaggctggaagggctactccgcgacacggcgagtgccgctgctggaagtggataatttttcgctgagcgaatcctcggccattaccgaataccttgatgaacgctttgcgccgccggagtgggagcgcttgtatccgcacgacctgcaaaaacgcgcgcgggcgcggcaggtgcaggcctggctgcgaagcgatctgatgcccatacgcgaagaacgttccaccgatgtggtgtttggcggcgcgaagaagcccgcgctcagccccgcggggcaaaccagtgcagctaaactctttgcgaccgccggcgcgcttttggcgcatggcggacagaatctgtttggcgaatggtgtatcgccgatgccgatcttgcgctgatgctaaaccgtctggtgctgaacggcgatgaggtgccggaagcgctggcggactacgcgacctttcagtggcagcgggcgtctgttcagcgttatgccgcactgtcggctaaacgtagcggctgataagcgcaggcagttccgttatcatagacagaccgtattgtctggtaaggggttgatatgaaactgatgttcgcatccgatattcacggctcgctgcctgcgaccgaacgcgttctggaacgctttgcgcagagcggggcgcagtggctggttatcctcggcgatgtgctcaatcacgggccgcgcaacgcgctaccggaagggtatgcgccggcgcaggtcgccgagcggttgaacagcgtcgcgcagcggattatcgccgtccgcggtaactgtgatagcgaagtcgatcaaatgctgctgcatttccctattaccgcccctggcagcaggtgcttagcgaacgctatcgcctgtttctgactcacggtcatctttatagcccggataatatgccgccgctcgccgctggcgatgtactggcttatgggcatactcatattccggttgccgagaaacgcggcgatattttcctcttcaatcctggctctgtgagcatcccgaaaggcggctttgccgccagctacggcatgctggaagatgatcgactgcaggttttcgcactcaatgataatcaggttattgcagaggccgcgatttacccgtaatttacccctcaatcgtaaagacgcgccgcgagagcgcttaaaagtaaggtttcctgatggcggaacagaagcatttggcaagcacagaatgggtcgatattgttaatgaaaacaatgaagtgatagcacagtccagccgcgagcaaatgcgcgcgcagtgtctgcgccaccgcgcgacctatattgtggttcatgatgggatgggcaagattctggtacagcgccgtaccgagagcaaagatttcatgccgggcatgctggatgcgacagcaggcggcgtggtgcaggcggatgaacaactgctggactccgcgcgccgcgaagcggaagaagagttggggattgcgggcgtgccttttgccgatcacggccaattctactacgaagataaacactgccgcgtttggggaagcctgtttagctgtgtttctcatggaccgtttgccctgcaggaagaagaagtcagcgaagtatgctggctgacgccggaagagatcaccgcgcgctgcgatgagtttaccgccgattcactgaaagcgctggcgctgtggatgactcgtaacgcgggcaataccggccacgatcgcgacgagccggaagaagacgaagcgtaattttctttatgcgttagcgtcataaaaaaggcagccatttggctgccttttttgtctcagcgggagattatttctgctgctgagaagactgaatcgccgtcagtgcgatggtgtagacgatatcgtctaccagcgcgccgcgggacaggtcgtttaccggcttacgcataccctgcagcattggcccgatggagatcaggtcagcggaacgctgtacggctttgtaagtggtgttaccggtgttcagatccgggaagatgaacacggtcgcgcggccagctaccggagagttcggcgctttggacttcgctacgtcggccattaccgcggcatcatactgcagcggaccgtcaatcatcaggtcaggacgtttttcctgcgccagacgagtcgcttcgcgtactttttctacatcgctacctgcgccggaggtgccggtggagtaggagagcatcgccacgcgcggttcgataccgaaggcaatcgcggaatcagcggactgaatcgcgatttccgccagctgttctgcagtcggatccgggttgatcgcgcagtcgccgtaaacgtaaacctgttccggcagcagcatgaagaatacggaagagaccagcgagctgccaggtgccgttttgataagctgcagcggcggacggatggtattggcggtggtgtgaaccgcgccggataccaggccgtcgacttcgtcttgttccagcatcagagtgccgagaaccacgttatcttccagctgttcgcgcgcaaccgcttcggtcatgcctttgttcttacgcagttcgaccagacgcgccacgtagctttcgcgaaccacttccggatcgacgatttcaataccagcgcccagctctacgccctgagaggccgcaacgcggttgatctcatccgggttgcccagcagcacgcaggttgcaataccgcgctcggcacagatggccgccgctttaacggtacgcggttcgtcgccttccggcagaacgacgcgtttgcccgctttacgcgccagttcggtcagctggtagcggaaggctggtggagacagacgacggctgcgctcggaggtcgcggtcagcgattcgatccaatcggcgttgatgtagttggcaacgtattcctgaactttctcgatgcgctcgtgatcgtcaaccggcacttccaggttgaagctttgcaggctcagagaggtctgccaggtgttggtgttaaccatgaataccggcaggccggtggcgaaagcgcgttcgcacagcttgctgatgcgcgcgtccatttcatagccgccggtcagcaggatagcgccgatttctacgccgttcatcgccgccaggcaggcagcaaccagtacgtctggacggtctgcggaagtcaccagcagagaacccggacggaagtgttccagcatgtgcggaatgctgcgcgcgcagaaggttacagacttcacgcggcgagtattgatgtcgccttcgttgatcacggtcgcattcaggtgatgcgccatgtcgatagcgcgcgtggcgatcaggtcgaagctccatggcaccgcgcccagtaccggcagcgggctgccattctgcagttgggccgggtcgatcttcacgactttcgctttagacgagtcgtcaaagatctcggacaggtcagggcgtgtacggccttgttcatcaaccggagcattcagtttgttaacgataacgccagtgatgctggtgtttttcgcgccgccgaagctgttgcgagtcagttcgatacgctcgttcagctgttccggggtatcggtgccctgagacatcacgaagacgatttccgcgttaagcgtttttgcgatttcgtagttcagagactgagcgaactggtgtttacgagtcgggaccaggccttcaaccagcaccacttcagcatcctgagtgttggcatggtagttggcgatgatctcttccatcagcacgtctttctggttgctggacagcagcgactcaacgtggctcatgttcatcggttcagcggcagtcgtcgttgaagagctggcgcgaacgatggtggtagtctggtctggagtatcgccaccggaacgcggctgggcgataggtttaaagacgctcaggcgaacgcctttgcgttccatagcgcggataacaccgaggctgacgctggtcaggcctacgctggttccggtagggatcagcatgatagtacgggacacgatatatcctctttcgttaccgccagttttaggcgggatacaaaacagcaccgccagcttaccgttcatacttcaagtggcaactcgaagcagtcaggattatcgctggcggtgtggaattaagcggtcagacggtgtgcgtcttgagcgatcaccagctcttcgttggtcgggataaccacggcagggcgggtgccttctttgttgatgaagccagacttgccgaaacgggcagccaggttacgctcgtgatcaacttcgaagcccagaacgcccagtttacccagggacagttcacgaaccatcgcggcgttttcaccgataccaccggtgaagacaacggcgtccagacggccatccatcagcgcggtgtaagaaccgatgtatttcgccagacggtggcagtaaacgtccattgcgcgtttagcgtcagctttatccgcgtagttgtcttcaacgtagcggcagtcgctggtgacttcggtcagacccagcaggccggactctttggtcagcattttgttgatagcatctacgctcatacccagtgcgtcgtgcaggtggaaaatgattgccgggtcgatatcaccagagcgagtacccatcaccagaccttccagcggggtcagacccatggaggtatcaacgcatttaccgttacggatagcggaaacggaaccgccgttgccgaggtggcaggtgatgatgttcagttcttcaaccggcttgttcagaaccttagcggcttcctgagtcacatagtagtggctggtgccgtgcgcgccgtaacgacgtacaccgtgctctttgtacaggctgtacggcagggcatacaggtaggactcttccggcatggtctgatggaacgcggtgtcgaacacggcaacgttcttgtctttcaggtgcgggaaggatttcagcgcttcagcgataccgatcaggtgcgccgggttgtgcagcggtgcgaaggaagcggagtctttgatgccctgaataacggaatcgtcgatgacaacggaactggtgtatttttcaccgccgtgaacgatacgatggccaattgcggtcagctgtgctgacagttctggtttttgtgccagaatagtgttaacgataaagttcagcgcttcactgtgagcggcgcctgcgcctaactcagcttcgtgtttgccgccgtccattttccatttgatacgggcttcaggaagatggaaacattcggctaaaccggagagatattcgtcaccgttaacggcatccaggatagcaaatttcagggaagagctaccgcagttcagaaccagtactaacttactcgacatggaagtaccttttatgatacgtggctaaaaaaacatcagtgtgtcacaaagcgtagcgcaggatgacatcgacatttatgattaacatcatgccttgttctgttttctggcacgatgagggaagtacatatgattttatgtcattttgcataattttccgccagcagcagaatatgcgataatttgactaacctggtaaaagggtctaaccgccctctcaggtgggcacaggatacctgattgccgcacccattgccaaaatcttttgaacgttgtcatgcacagttggtgttttgcacgaaaattttaagttttatatgtaaagttgaggtatagccatgtcgacccctgagaatcgccccgttagcttttttagcttgtttcgtcgcgggcagcactatgcgaagacctggcccctcgataagcggctggcgccggtgtttatcgaaaaccgcattattcgcgccacccgctacgcgattcgcatcatgccgccggttgcggtcttcaccctgtgctggcagatagcgctcggcggccagctcggcccggccgtcgccaccgcgctatttgccttaagcctgccgatgcaggggctgtggtggctgggcaagcgttccgtaacgccattaccgccatcaatattgagctggttttatgaagtgcgcggcaaattacaagaggccgggcaggcgttagcgccggttgacggcaagccggattaccaggcgctggctgacacgcttaagcgcgccttcaaacaactggataaaactttccttgatgatttgtaattccatacggaaaacgcatataaaagaaggcgcatgatttatgcgccttctttatttcacgccgtaagtgctacaggagtcaaaaatggaaatgaccaatgcgcagcgtctgattttgtccaatcagtacaagatgatgactatgctcgacccggacaacgccgaacgttaccgccgtctacagaccatcatcgagcgtggatatgggctgcaaatgcgcgagctggaccgcgaatttggccaactgacggaagaaacctgccggaccattatcgatattatggagatgtaccacgcgctgcacgtctcgtggaccaatctcaaagatgcgtccggtattgatgaacgtcgggtgaccttccttggctttgatgtcgccaccgaggcccgttatctcggttacgtgcgctttatggtcaatgtagaagggcgctatagccacttcgacgcaggaactcacggctttaactcgcagacgccaatgtgggaaaaataccagcgtatgctggccgcctggcactcctgcccgcgccagtatcatttgagtagtaacgaaattaaccaaattattaatgcctgatggaggtgcccgtgcagtgtaaaggtttcctgttcgatctcgacgggacgctggtggattctttgccggtggtcgagcgctcatggtgtaaatggggcgatcgtttcggcattccgcatgatgaaattctcggtttcattcacggtaaacaggccatcacttcgattcgccattttatgccggggcgcaacgaagaggatattcaggccgagttccgcttccttgagcagattgaagccaccgatatcgacggcattgtcgcactgccgggcgcgttaagcttgctgaacacgcttaatgaagcggggatcccgtgggctatcgtgacttcgggttccatcccggttgctcacgcccgccaccgtgcggcaggtctgccgatgccgaaagtgtttgtcaccgccgagcaggtgaagaaggggaaaccggcgccggatgcctatctgcttggcgctgaattgctggggataccggcgcaacagtgcgcggtggtcgaagatgcgccggcggggctgctttccgggctggctgccggatgccgcaccatcgctgtcaacgttccggcggatgcgccgcgtcttgatgaagccgatctggtgctgacgaccctcgaaagtttgcgcattgagcggcaggctgatggcaatgttcaggtgaatcttaaagcataatctcatgacttagccccgcgtcgccggggcttttttgtgccacaatttcggctccctcttcagacaaggataagttgtgaacggtgaattgatttgggtgttatcgctactggccatcgcggttgtcttatttgcaaccggcaaggtgcgcatggatgccatcgcgctgatgatcatcgttgcgtttgtgcttagcggtacgttaaccctcagcgaagctttctctggctttagcgatccgaacgtcattctcattgctgctttatttatcattggcgacggcctggtgcgcaccggcgtggcgactaaaatgggctcctggctggtcaaggttgctggcaatagtgaaactaaaatgctggtctatctgatgctcaccgttgccgggctgggcgcgtttatgagctcaaccggcgtcgtggcgatatttattccggtggtgctcagcgtctcgcttcgcatgaatacctcaccatcgcggctgatgatgccgctaagcttcgccgggttaattagcggcatgatgaccctggtggcgacgccgccgaacctggtggtcaacagtgaactgctgcgcgaagggttgcatggattcagcttcttcagcgtgaccccgattggcctggtggtgctggtgctgggtatcgtctatatgctggtgatgcgctttatgctgaagagcgaggatgacagcgccgctcgcgatgtgcgcaagaaaagcaccttccgcgatttaatcaaagagtatcgtcttaccggcagggcgcgccggctggcgattcgcccgggctcgccaatgatcggccagcggcttgatgatttaaagttgcgtgaacgctactgcgccaatgttatcggcgtcgaacgctggcggcgttttcgccgggtgattgtcaacgttaacggggtatcggagtttcgcgcccgtgacgtgttgctgatcgatatgtcggcctccgacgtcgatctgcgacagttctgtggtgagcagatgctcgaaccgatggtgctgcgcggcgaatactttgccgatcaggcgctggacgtcggcatggctgaagtctcgttaatacctgattcagagcttattggtaaaacggtgcgcgagatggccttccgtacccgctttggcctgaatattgttggcctgaagcgcgatggcaaagcgctcgacggggcggtagtcgatgaaccgctacaattaggcgatattatgctcgtggtcggcaactggcggcagatagccatgctggcgaaacgcggccgcgattttgtggtgctgaatatgccggtagaggtcaacgatgcttcgccagcgcacagtcaggcgccgcacgccatattctgcctggtgttgatggtagcgctgatgcttaccgatgaaatccccaaccctatcgctgccatcatcgcctgcctgttgatgggcaagtttcgctgcatcaacgccgagagcgcctataaggcgattcactggccgagcatcattttgattgtggggatgatgccgttcgccctggcattgcagaaaaccggcggtgtggatttggtggtgcaggggttaatggacgtcgccggaagtaaaggtccttatttgatgctgggttgcctgttcgtgatgtgcgcggcgattggtttgtttatctctaacaccgcgacggcggtgctgatggcgccgattgctctggcggcggcgaaatcgatgggagtctcgccatatccttttgccatggtggtggcgatggcggcttcggcggcttttatgaccccggtctcttcaccggttaacacgctggtgctcggacccggtaaatattcgttcagtgattttgtcaaaatcggtgtgcccttcaccgtactggtgatggtggtctgcgtgctgctgatcccggtactctttccgttttaattcattcaggccgggcaggggatgcccggcctgataattaaagcggtgaatcctggctgatttcatcgagcgacaggtggaagctcgggacaaacacctgcataaagtaatccatctccgggctacggcgagactccagcgttttttccagtcgacctttggctaacaggaattcattattgccggctgaaagctcttcaagacatttcagataggcgcaaagggcgtcggcctgtttcacaatcgactgctcttcttcactgtaatggtgctcatcaatcaggggctcaaagatatcgcgcagctcatcaggtaccatatcgaccagtttttgctgggcgattttctcaatcgccttatattcctgggcaatctgcgaattgaagtatttcaccggcgtgggcagatcgccggtgagtacctcggaggcatcgtgatacatcgccagcagggcgatgcgttcggcgttgacctggccgccaaacttgcggttcttaattgccgccagcgcatgggcgaccatcgccacctgcaaactgtgctcggagacgttttcggtacgcacgttgcgcatcaaaggccagcggttaattagtttcaggcgggagaggtgggcaaagaaatgactctgactcataggaacccttaagcggtgacaacatcaggttccattgtgcgcagggatcgccgccggatgcaaataccggcggcggcgcgattaaagctgatgatagccggagaggaaacggccaaagcgagaaatagccatttccaggtcatcttcacgcggcagggtgacgatacgcacgtgatccggccacggccagttaaaggcggtgccctgaaccagcagcactttctcctgtagcaggaaatcgagcaccattttctggtcatcgtggatattaaagcgtttggcgtcgattttcgggaacatgtacagcgcgcctttcggcttgacgcaggaaacgcccgggatctcgttgattaactcccaggcgcggttgcgttgctcatacaaacgcccgcccggaatgataaattcgctaatgctctgatagccgcccaacgcggtctggatagcgtgttgcgccgggacattggcgcacaggcgcatcgatgccagcatttccagcccttcgatatagcctttggcgtgctttttcggcccgttaagcaccatccagccctggcggaaaccagcgacacgataggtcttcgacagtccgttaaaagtgacggtcagcatatccggcgccagcgcggcgatcgaatggtgttcggcatcgtcgtacaggatcttgtcgtagatttcgtcggcgaaaataatcaggttgtgctgacgggcgatctcgacgatctcctgcaacagttctttggaataaacggcgcccgttgggttattcgggttaatgatgacaatcccgcgggtgcgtggtgtaattttggcgcggatatcgtcgagatccgggaaccagtctgaagattcgtcgcacagatagtgcaccgctttgccgctggaaagcgagaccgcagcggtccacagcgggtagtccggagccggaaccagcatttcgtcgccgctgttaagcagcgcctgcatggcctggacgatgagctcggaaacgccgttaccgatatagatatcttccacggtaacatcacgcatcccgcgcgcctggtagtgctgcataatggctttacgggcggaatagagaccttttgagtcgctgtagccctgggcggtcggcagattgcggataacgtcgacgaggatttcgtcaggcgcatcgaagccgaacggcgccgggttgccgatattcagcttgagtactttgttgccttcttcttcaaggcgttttgcttctttcagaaccggaccgcggatatcgtaacagacattctctaacttgctggatttttcgataggggacatgaacctttgaccttttagctgttatcgccactccctgccgtggaagtcagcacggaacaatgtactccgcatccccgctgttttgaagggttaacaggagaagattttgcgaatagtatttttttagagtaatgaatttatctgtggaagggcgttattctttatataatgtgcctgatatgggtttttgaatggttttatgttgcgcgtattaggcaattacatggatatttatccggtttgttgctgaaggaaaaagcggtttgcctgaattttaaccgctaaaagacactatgctaataaaaaagagggcaatggcaactgtagcaactatgttaattttttttaataaaacatgccaattaatgaatcaggtatatttgactgcatggattatttcggcttttgttaatttaattatagtgctgcaaaaaagtttaaaattaccttagataatactgattagcgcttataaatattgtggttttcggttaggataagacggttaatatcgacgtgtaaacctctgtttaacggcgtgattttattaatatattgttattgcaggtttttttgtttgtgttcagcaggcgttgttaggcgtgtcaggcttcctggcgcaacgacatatgttattgcagactttgtttgagattcatcacataacctaagtctcagtaattaaaaatgcgtagaactacgaacaaaatattactcaaatttttcgcacatttgtcgtgaacgagtgctttcaaatgcaatgacgttcttccagttgtcatccgcggcaattgtccgctcggcacgaggctcatggaatagccggaaacctggatacagcatcaacaaggcaggccagcatcagcgcctgtaagtgaagaaatatgataaatgcaaatcgtccgatactgaatctcgatctcgatctgctgcggaccttcgtcgccgtcgccgatctgagcacctttgcggcggctgctgccgcggtatgtcgtacccagtccgccgtcagtcagcagatgcagcgcctggagcaactggtaggcaaagagcttttcgcccgtcatgggcgtaataaattactgaccgagcaggggatccaactgctcagctacgcgcgcaaaatactgcgttttaatgatgaagcctgcatgtcgctgatgtttggcagcctgcaggggacgctcactatcggcgcctcagatgaaacggcggataccatcctgccttatctgctcaatcgaatcggcagcttctatcccaaactgacgctggaaattaaggtcctgaattacgccgatatcgtcgcgaagttaggcagcggcgagatcgacctggcattaacgacgcatcaaaccggcgaatttgacgtcctgacgctgcgtacctcgccgacgctgtggtactgcgccgcagattacgtactggcgcagggtgaatccgttccgctggtgctgctcgaagagtccgggccgtttcgcgaagatatcatctccgcgctgaacgccgcgcaggttccctggcatttggcgcatgccgccagttctttagccggggtgaaggcggcggtgaaagcgggccttggcgtcaccgcgcgtccggtagaaatgatgagtccggaactacgcgtgccgggtaaaagcgatggcctaccgggcttgcctgatacccactatgtgttgagctgcaatccgcaacgggaaaacgaactggcgcaggcaatttttcagtcgctgagtcaggaccataatccgtgggaaacggaaacgctgtataccccggaaggggagacggctctctggtctcataaggccaggttatccgataacgatcacattaatccggtaacaaaatgtaagtgtaaaaaagagccaccgattgacgaaatgaggtcagaggctctttttttttatattttacaaggattttaagcagtttaataatttattgatctatgaatcaatcagttagcttgaaagcggctattgtttccccgtttttagctgcagtttcaatacttcctgctaatgttaaaaaaccggacggattgttgccgttttccagatgtaattaacaaaagcgtgtcacagatcaagaaaatacccctacttgggggaggaatcgcggccaaatcctgtcaaaatagattggcgaaattgatttacatctaaaacggacacgattcaacaacactaaatccgaatgatatgcaaggttattacgcaacaaagggcatttaatgttaatgaaaatattccaatgtaaattaatgtagttaaaacttttgttaaagttgacaaaaggttaaagaaaggggtaaaaagccacggcatttgggcttcctcatcaaccagggacgcttttttgcaaggtcatttttttattcctcccgtgaaacgctgtggcgttcatctgccatcaagagcagagggttttggcgctacacttttttggttaagcaatgcgtatgtcaacatccactgaagtcatcgctcatcattgggcattcgctatatttctcatcatcgctatcggtctgtgctgcctgatgctcgtcggcggctggtacctcggcggtcgcgcgcgcgcgcgtagcaaaaacacgccgtttgaatcggggatcgactccgttggttcggcccgcttacgtctttctgcgaagttttatctggtcgccatgttcttcgttatcttcgacgtggaagccctgtatctctacgcatggtcaacatccattcgcgaaagcggctgggttggctttgtggaagccgcaattttcattttagtgctactggctggtctggtttacctcgttcgcatcggcgcactggactggacgcctgcgcgttcccgtcgcacgctggttaacccggaaacagacagtcccactaaccgtcatatgcagtaaaagcgaggcaataagatggattatacgctcacccgcatagatcctaacggtgagaacgaccgttacccctgcaaaaacaggagatcgtaactgaccccctggagcaagaagtcaataaaagcgtgtatatggggaaactcgaacacgcgctgcatgacatggtgaactggggccgtaagaactcgatttggccgtacaacttcggcctgtcttgctgctatgtagaaatggtgacgtcattcactgcggtgcatgacgttgcgcgttttggcgcggaagtactgcgtgcctctccgcgtcaggccgacctgatggtggtcgccggtacctgcttcaccaaaatggccccggttattcagcgcctgtacgatcaaatgctggagccgaagtgggttatctctatgggcgcatgcgctaactccggcgggatgtacgatatctactccgtcgtccagggcgtggacaagtttattccggtggatgtttacatcccgggctgtccgccgcgtccggaagcttatatgcaggcgctgatgctgctgcaggaatccattggtaaagagcgccgtcctctctcatgggtggttggcgatcagggcgtctatcgcgccaacatgcaatccgagcgcgagcgtaaacgcggcgaacgaattgcggtgaccaatctgcggactccggacgagatttaacttgcgcctgcgggcgggaaccagacttcgcaaatcaatctacaaaagcagcgaagcctcgcccggcagtcaccacggaccttttgcaatggtgaacaatatgactgatttaaccgcgcatgacgccgcaccagcctggcaaacccgcgatcaccttgatgacccggtgatcggcgaactgcgcaaccgttttgggccggatgcctttaccgttcagcctacccgtactggcgttccggtggtgtgggtgaagcgcgaacagctgcttgaggtgggtgatttcctgaagagattgccaaaaccttacgtgatgctgtttgacctgcacggcatggacgaacgtttacgtacgcaccgcgatggcttgccagccgcggatttttccgttttctaccacctgatctcagtagaccgcaaccgcgatatcatgctcaaggtggcgttgtctgaaaacgatctgcatctgccgaccttcaccaaactgttccctaacgccaactggtatgagcgtgaaacctgggaaatgtttggcgtgaccttcgacggtcacccgaatctgcgccgcatcatgatgccgccgacctgggaaggccacccgctgcgtaaagactatccggcgcgcgccaccgaattcgatccttttgagctgaccaaagccaaacaggatttggaaatggaagcgttaaccttcaagccggaagagtggggtatgaagcgcggcaccgaaaatgaggactttatgttcctcaacctcggcccgaaccacccgtccgctcacggcgcattccgtattattctgcagttggatggcgaagagatcgtcgactgcgtgccggatatcggctaccaccaccgcggcgcggagaagatgggcgaacgccagtcctggcacagctacatcccgtacaccgaccgtatcgaatacctcggcggctgcgtcaacgagatgccgtacgtgctggcggtggaaaaactggccggaatcaccgtgccggatcgcgtgaacgtgatccgcgtgatgctgtccgaactgttccgcatcaacagtcacctgctgtatatctcgacctttattcaggacgtcggcgcgatgaccccggtcttcttcgcctttaccgaccgtcagaaaatctacgatctggtcgaagccatcaccggtttccgtatgcacccggcatggttccgcatcggcggcgtcgcccacgacctgccgcgcggctgggatcgcctgctgcgtgaattccttgagtggatgccaaagcgcctggattcctatgagaaagccgcgctgcgcaacactattctgattggccgctccaaaggcgttgccgcctacaccgcgaaagaagcgctggagtggggcaccaccggcgcaggtctgcgcgcgaccggtatcggcttcgacgtgcgtaaatggcgtccttattctggctacgaaaacttcgactttgaaatcccgaccggcggcggcgtttccgactgctacacccgcgtgatgctaaaagtggaagagctgcgccagagcctgcgcattctccagcagtgcctcgataatatgccggaaggcccgttcaaagcggatcacccgctgaccacgccgccgccgaaagagcgcactctgcagcacattgagaccctgattacgcacttcctgcaggtttcctggggcccggtgatgccggccaacgaatccttccagatggttgaagcgacgaaggggattaacagttactacctgaccagcgacggcagcaccatgagctaccgtacccgtattcgtaccccgagctatgcgcacctgcagcagatcccggcggcgatccgcggcagcctggtatccgaccttatcgtctatctgggtagtatcgattttgttatgtcagacgtggaccgctaattatgcacgagaatcaacaaccacaaaccgaggcttttgagctgagtgcggcagagcgtgaggctattgagcacgaaaagcaccactacgaagacccgcgtgcggcgtccatcgaagcgctgaaaattgttcaaaaacagcgcggctgggtgccggatggcgcgatctacgcgatcgccgatgtgctggggatcccggcaagcgacgtcgaaggcgtggcgacattctacagccagatcttccgccagccggttggccgtcacgtgatccgctactgcgacagcgtggtgtgccatatcaccggtttccaggggatccagtcggctatcgagaaaaagctggacatcaaaccgggtcaaaccacctttgatggccgcttcacgctgctgccgacctgttgccttggcaactgcgacaaggggccgaccatgatgattgatgacgacacgcacagttatctgacgccggaagcgattcctgacctcctggagcggtataaatgaaaaccattattcgtactgccgaaacgcatccattaacctggcgtctgcgcgatgacaagcagccggtgtggctggacgagtatcgcagcaaaaacggttatgaaggggcgcgcaaggccttaagcggcatggcgccggatgaaatcgtcaatgcggtaaaagacgctggcctgaaagggcgcggcggcgcgggcttttccaccggtctgaagtggagcctgatgccgaaagacgagtccatgaacatccgttacctgctgtgtaatgccgatgaaatggaaccgggtacctataaagaccgtctgctgatggaacagctgccgcacctgctggtggaaggcatgctgatctccgcctttgcgctgaaggcctaccgcggttacatcttcctgcgcggcgaatatatcgaagcggcgcagcatctgcgtcgtgcgattgctgaagctaccgaagcgggcctgttggggaaaaatatcctcggcaccggttttgacttcgagctgttcgtgcataccggggcagggcgctatatctgcggtgaagagacggcgcttatcaactcgctggaaggccgccgcgctaaccctcgctccaagccgccgttcccggcgagctccggcgtatggggcaaaccgacctgcgtcaacaacgttgaaaccctgtgcaacgtccctgcgattctcgccaacggcgtggagtggtaccagaatatttcaaccagcaaagacgccggcaccaagctgatgggcttctccgggcgcgtgaagaatccgggcgtctgggaactgcctttcggcaccaccgcgcgcgagatcctcgaagattacgccggcggtatgcgcgatggcctgaagtttaaagcctggcagccgggcggcgccggtaccgacttcctgaccgaagcgcacctcgatttgccgatggaatttgaaagcattggtaaagcaggtagccgtctgggcaccgcgctggcgatggccgtcgaccacgagatcggcatggttccgctggtgcgcaacctcgaagaattttttgcccgcgaatcctgcggctggtgtacgccttgccgcgacggcctgccgtggagcgtgaagatcctgcgcgccctggagcgcggcgaaggccagcctggcgatatcgaaactcttgagcaactgtgtcgattccttgggccgggtaaaaccttctgcgcgcacgcgccgggcgcggttgaaccgctgcagagcgctatcaaatatttccgcgaagaattcgaggctggcattaagcagcagttcagtaatacccatgcaattaacggtattcagccgaacctgcttaagacgcgctggtaatctaaaggttttttatttttggaagcacgcaaatggctacgattcatgtagacggcaaagaatacgaggtcaacggagcggacaacctgctagaggcttgtctctctcttggtcttgatattccatacttttgctggcacccggcgctagggagcgtcggtgcttgccgccagtgtgcggtgaagcaatatcagaacgcggaagacacgcgtggtcgcctggtgatgtcctgtatgactccggcatctgacggcacctttatttctattgacgacggcgaagcgaagcagttccgcgaaagcgtggtggagtggctgatgaccaaccacccgcacgactgcccggtttgcgaagagggggcaactgccacctgcaggatatgacggtcatgaccggccatagcttccgccgctatcgtttcaccaagcgtacccaccgcaaccaggatctggggccatttatttctcacgaaatgaaccgctgcatcgcctgctaccgctgcgttcgctactataaagattatgccgacggcaccgatctgggcgtttatggcgctcatgacaacgtctacttcggccgcccggaagatggcacgctggaaagcgagttctccggtaatctggttgaagtctgcccgaccggcgtcttcaccgataaaacgcactccgagcgttacaaccgtaagtgggatatgcagtttgcgccgagcatctgccagcagtgttccattggctgtaacatcagccctggcgaacgctatggcgagctgcgtcgtatcgaaaaccgctataacggtaccgttaaccgctacttcctctgcgaccgcggtcgtttcggctatggctacgtaaacctcaaagatcgtccgcgtcagccggttcagcgccgcggcgacgatctgatcgcgctcaacgccgaacaggcgatgcagggggcggcggatatcctgcgtcagtcgaagaaagtcattggtatcggttctccgcgcgccagcattgaaagcaacttcgcgctgcgtgagctggtcggtagcgaaaacttctataccggcatcgctaaaggcgaacaagcgcgcctgcagatgatgctgaaagtattgcgtgaaggcgggattcctaccccgacgctgcgcgatatcgaatcctacgatgcggtgctggtgctgggcgaagatattacccagaccggtgcgcgcgttgccctggcggtacgccaggcggtgaaagggaaagcacgcgaaatggcggcggcgcagaaagtggccgactggcagattgcggcgattctcaacatcggacagcgcgccaagcatccgttattcgtcactaatatcgacgacactcgcctcgatgacatcgcggcgtggacttatcgcgcgccggtggaagatcaggcgcgtctgggctttgctatcgcccatgcgctggacaacagcgcgccggcggttgatggcctgagccatgacctgcagggtaaagttgatgtgatcgttcaggcgctggccggggcgaaaaaaccgctgattatctccggcactaacgccggcagcatggaaatcattcaggctgccgccaacgtggcgaaagcgttgaaaggccgcggcgccgatgttggcgtgactatggtcgcccgcgcggtgaacagcgttggcctgggcatgatcggcggcggctcgcttgaagaggcgctggacgaactggaaagcggtgccgcagatgcggttatcgtgctggaaaacgacctgcaccgtcatgcttccgccgcgcgcgtcgacgctgcgctggcgaaagcgccgctggtgatggtggttgatcatcagcgcaccgcgattatggacaaagctcaccttgtgctctccgcggcaagctttgcggaaagcgacggtaccgtggtgaacaacgaaggccgcgcccagcgtttcttccaggtttacgatccggcttactacgacgcgaaaaccgtgatgctggaaagctggcgctggctgcattcactgcacagcaccgtcaacaaccgtcaggttgactggacgcagctggaccacgtcatcgatgcggcgattgcggcgctgccgcagctggcgggcattaaagatgccgcgccggatgcgaccttccgcattcgcggtcagaagctggcgcgtgaaccgcaccgctacagcggccgcacggcgatgcgcgccaacatcagcgtgcacgaaccgcgccaaccgcaggataaagacaccatgttcgccttctcgatggaagggaacaaccagccgtccgcgccgcgttcgcaaattccgtttgcgtgggcgccgggctggaactccccacaggcatggaacaaattccaggatgaagtgggcggtaaactgcgccacggcgatccgggcgttcgtctgattgaagcttccgccagcgggctggagtacttcacggcggttccggccagcttccacgccgaagagggcaaatggcgtatcgcgccgtactatcacctgtttggcagcgatgagctgtctcagcgttctccggtgttccagagccggatgcctgagccgtacatcaagctgaacccggcggatgccgcaaaacttggcgtcaacgccggggcgatggtttccttcagcgtagaaggccagacgctgagtctgccgctggttatttctgaagggctggccgcgggacaggttggcttaccgatgggcatgccgggcatcgcgccggtactggccggggcgcgtattgattcactgcaggaggcgcaagcatgagttggttaacgccggatcttatcgacattctgttaagcatcctgaaggccgtggtcattctgctggtggtcgtcacctgcggcgcgttcatgagcttcggcgagcgtcgtctgctcggcctgttccagaaccgctacggacctaaccgcgtgggctggggcggttcgctgcagctggtcgccgacatgatcaagatgttcttcaaagaggactggatcccgcgcttctccgatcgcgtgatctttactctggcgccggttatcgcctttacctcgctgctgctggcttttgctatcgtgccggttagcccgtcgtgggtggtcgccgacctgaacatcggtattctgttcttcctgatgatggcaggtctggcggtctacgcggtcctgttcgccggttggtcgagcaataacaaatactcgttgctggggcgatgcgtgcttccgcgcaaacgctgagctacgaagtattcctcggtctctccctgatgggcgtggtggcgcaggcggggtcattcaacatgaccgatatcgtcaacaaccaggcgcatctgtggaacgtcatcccgcagttcttcggcttcgtcactttcgccatcgccggcgtggcggtatgtcaccgtcacccgttcgaccagccggaagcggagcaggaactggccgatggttaccacattgaatattccggtatgaaattcggtctgttcttcgtcggtgaatacatcggtatcgtcaccgtatcagcgctgatcgttacgctgttcttcggcggctggaatggcccgtggttaccgcctttcatctggttcgcgctgaaaaccgcgttcttcatgatgatgttcattttgatccgcgcatcattaccgcgtccgcgttatgaccaggtaatgtcctttggctggaaggtatgcctgccgttaacgctggtcaacttgttggtaacggcggctgtcattctctggcaggcgcaataaggggtgaattgaacatgaccttaaaagaattattggtagggttcggcacccaggtccgcagtatttgcatgatcgggatgcacgccttcgccaaacgtgaaactcagatgtacccggaagagccggtatatctgccgccgcgctatcgtggccgtatcgtgctgacgcgcgatccggacggtgaagagcgctgcgttgcctgtaacctgtgtgcggtagcctgcccggttggctgtatttctctgcagaaagcagagaccaaagacggccgctggtacccggagttcttccgcatcaacttctcacgctgcattttctgcggcctgtgcgaagaagcgtgcccgaccacggcgattcagttgaccccggacttcgaactgggtgaatacaaacgtcaggatctggtgtacgaaaaagaggatctgctgatttccggtccgggcaaatacccggaatataacttctaccggatggcgggtatggcaatcgacggcaaagataagggcgaagcggaaaacgaagctaagccaatcgacgtcaagagcctgttaccgtaaggagaggggcaatggaattcgctttttatatctgtggcctgatagccatcctcgcaaccttgcgggtcgtcacccacaccaatccggtgcacgcgttgctgtacctgatcatttcgctgttagcgattgccggggtgtttttctcgctgggcgcttacttcgccggtgcgctggaaatcatcgtttacgccggggccattatggtgttgttcgtgttcgtggtgatgatgctcaacctgggcggcaccgagatcgaacaggaacgcaaatggctgcagcctgggatctggattggcccggccatcctttccgcggtgctgctggtggttatcgtttacgccatcctgggcatcaatgatcagggtatcgacggcgcggcgatcaacgccaaagaagtgggtattgcgctgtttgggccgtacgtcctggcggtggagctggcctccatgctgctgctggcgggcctggttgtcgccttccacattggccgcgaagagcgcgccggtgaggtgctgagcaaccgcgtgaacgacagcgacaaaagaaaaacggaggaacacgcatgatccccttaacacatggactgatcctcgccgccatcctgtttgtgctcggcctgactggtcttgtgatccgccgcaatctgctatttatgctgattagcctggaaatcatgattaacgccgccgcgctggcattcgtggtcgcgggaagctactggggccagactgatggtcagattatgtatatcctcgccatcagcctcgcggctgcggaagcgagtatcggtctggcgctgctgctgcagctccatcgtcgccgccagaacctgaacatcgattcagtaagtgagttgcgtggatgaacatgcttgccttaaccattcttctgccattgattggctttgtgctgctggccttctcccgcggacgctggtcggaaaatctttccgccaccgttgggatgggctcggtaggcctggcggcgctggtgacggcgtacgtcggcgtcgactttttcgctaacggcaaacaggcggtcagcgtaccgctgtggaactggatgtcggtcggtgatttcaacatcggcttcaacctggtgctggatggcctgtctctgaccatgctctccgtggttaccggcgtcggcttcctgatccacatgtttgcctcctggtacatgcgcggcgaagagggctactctcgcttcttcgcttataccaacctgtttatcgccagcatggtcgttttggtgctggccgataacctgctgttgatgtacctgggttgggaaggcgtgggtctttgttcttacctgctgatcggcttctattacaccgatccgaagaacaacgccgcggcaatgaaagcgtttgtggtcacccgcgtcggcgacgtgttcctcgccttcgcgctgttcattctttataacgaactgggtaccctgaacttccgcgaaatggttgagctggcgccgcagcacttcgctaacggcagcaccacgctgcagtgggcgacgctgatgctgctcggcggcgcggtcggcaaatccgctcagctgccgttgcaaacgtggcttgccgatgcgatggcgggcccgacgccggtctctgcgctgatccacgcggctaccatggtgaccgcgggcgtgtacctgattgcccgtacccacggcctgttcctgatgacgccggaagtgctgcatctggtcggtatcgttggcgcaatcacgctggtgctggcgggcttcgccgcgctggtgcagactgacatcaaacgcgtgctggcttactcgaccatgagccagattggctacatgttcctcgcgctgggcgtgcaggcatgggacgcggcgatcttccacctgatgacgcacgcgttctttaaagcgctgctgttcctgtcgtccggttcggtgatcctcgcctgccatcatgaacagaacatcttcaagatgggcggcctgcgcaaatccattccgctggtttatgtctgcttcctggtgggggcgcggcgctgtccgctctgccgcttatcaccgcaggcttcttcagtaaggatgagattctggctggcgcgatggctaacggccatatcaatctgatggtagcgggcctggtcggcgcctttatgacctcgctgtataccttccgtatgattttcatcgtgttccacggtaaagagcaaattcacgcgcacgcagggaaggggattacccaccatctgccgctgattgtgctgctgattctgtccaccttcgttggcgcgctgattgtgccgccgctggaaggcgtactgccgcagaccactgagctcgcccacggtagcgtgatgacgctggaaatgacctccgggattatcgctatcgccggcatcctgatcgccgcatggctgtggctgggcaaacgtacgctggtgacttccatcgccaacagcgcgcctggccgcttcttcggtacctggtggttccatgcctggggcttcgactggttatacgacaaagtgttcgtgaaacctttcctcggtattgcctggctgctgaagagcgatccgctgaactcgttgatgaatatcccggcgattctgtcccgcttcgcaggcaaaggtctgctggtgagcgagaacggctatctgcgctggtatgtggcttcaatgagcatcggcgcggtggtggtgctggctctgctgatggtactgcgttgatttgagcgcgcggttttgcccggtggcgctttgcttaccgggcctacgaaaccgtaggtcgggtaagcgaatcgccacccgacacaacaaaccgccctcaaacgtgaatgtagtcgaattcgttgaaaatcggtcctgaacgggactttaacaaggaataaaaatcgccatgttattaccctggctaatattaatcccctttattggcggcttcctgtgctggcagactgaacgctttggcgtgaaactgccgcgctggatcgcgctgattaccatgggactgacgctggtgcttggcctgcagctgtggatgcagggcggctattctctgacgcaatccgctggtattccgcagtggcagtcggaattcgtgctgccgtggatcccacgtttcggcattagcatccatctggcgattgacggtctgtcgctgctgatggtggtgctgaccggcctgctcggcgtgttggcggtgctctgttcctggcgcgaaatcgaaaagtaccagggcttcttccacctcaacctgatgtggatcctgggcggcgtcatcggggtattcctcgccatcgacatgttcctgttcttcttcttctgggaaatgatgttggtgccgatgtacttcctgatcgcgctgtggggtcacaaagcctctgacggtaaaacgcgtatcacggcggccaccaagttcttcatctatacccaggcgagcggtctggtgatgctgatcgccattctggcgctggcattcgtccacttcaacgccaccggcgtgtggaccttcaactatgaagagctgctgaaaactccgatgtctcacggcgtggaatacatgctgatgctcggcttcttcatcgccttcgcggtgaaaatgccggtagtgccgctgcacggctggctaccggacgcccactcccaggcgccgacggccggttccgtcgacctcgcgggcatcttgctgaaaaccgcggcctacggtctgctgcgctttgcgctgccgctgttcccgaacgcctccgccgagtttgcgccaatcgccatgtggctgggcgtgatcggtatcttctacggcgcgtggatggccttcgcccagaccgatatcaaacgtctgattgcttacacctccgtttcccacatgggcttcgtgctgattgctatctacaccggtagccagctggcttatcaaggggcggtgattcagatgattgcccacggtctgtccgctgcgggtctgttcattctgtgcggccagctgtacgaacgtctgcacacccgcgatatgcgccagatgggcggcttgtggagcaaaattaaatggctgccggcgatgtcgatgttcttcgctgtcgccaccctggggatgccgggcaccggtaactttgtcggcgaatttatgattctgttcggcagctataaagtggtgccggtgattaccgttatctcgacctttggtctggtattcgcttccgtttactcgctgtcgatgctgcatcgcgcctacttcggtaaggcgaaaagcgaaatcgcgacgaaagagctgccggggatgtccctgcgtgaactgtctatcatcctgctgctggtggtgctgctggtgctgttgggcttcttcccgcagccgattctcgacacctcgcatgctgcgatgagcaacattcagcagtggtttgttaattctgtttctactacaaggccgtaattcgccatgacaataactccacaacaactgatcgcactgctaccgctgctgatcgtcggcttgacggtggtggttgtgatgctctccattgcgtggcgacgcaatcattttctcaatgccacgttgtcggttctcggactaaacgccgcgctggtctcgctctggtttgttggtcagaacggggcgatggacgtcaccccgctgatccgcgttgacggttactcgatgctctataccgggctggtgctgttggcgagcctcgcgacctgtactttcgcctacccatggcttgagggttacaaggacaataaagaagagttctacctgctggtgctgatcgccgcgctgggtggcattctgctggccggcgccaatcacctggcttcgctgttcctcggtatcgaattaatttcgctgccgttgttcggcctggtcggttacgccttccgccagaaacgttcgctggaagcgagcattaaatacaccatcctctccgcggcagcctcgtctttcctgctgttcggtatggcgctggtgtatgcaaattccggcaacctgtccttcctcgcgctgggcaagagcctggctgacaacgctctgcacgagccgctgctgctggcgggcctcggtctgatgatcgtcggtcttggctttaaactgtcgctggtgccgttccacctgtggacgccggatgtataccagggcgcgcctgcgccggtatccaccttcctggcgaccgccagcaagattgccatcttcggcgtggtgatgcgtctgttcctgtacatgccggtgggcgacagcgaagcggtacgcgtggtgctgggcctgatcgccttcgcctctatcatcttcggtaacctgatggcactgagccagaccaacattaagcgtctgctcggttactcttccatctcacacctcggttatctgctggtggcgttaatcgccctgcagagcggcgaaatgtcgatggaagccgttggcgtctatctggccggttatctgttcagcagcctcggcgcgttcggcgtggtcagcctgatgtccagcccgtaccgcggtccggatgctgactcgctgttctcctaccgcggtctgttctggcaccgtccgatcctgtcggcggtaatgacggtgatgatgctgtcgctggccggtattccgatgaccctcggctttatcggtaagttctacgtgctggccgtcggtgtgcatgcgcacctgtggtggctggttgccgcggtggtgatcggctcggcgattggtctctactactacctgcgcgttgccgtcagcctgtacctcagcgccccggagcagctgaaccgcgatgcgccgtcaaactggcagtacagcgccggcggtatcgtagtgctgatctccgcgctgctggtgctggtgctcggcgtgtggccgcagccgctgattagcatcgtgcagctggcgacgccgctgatgtaatctgcgctataaataaaaaccgccgagttttcggcggtttttttatgcctgcggtttatgctagccgataaaccataaaatcctccgccagtagcgtattggcgaaaatctcccggcattccgccagcatacgcaggcagccttccgcatcgtagcgcgagctaaaatgggtggcgattagcgtgccgactcccgcttctttggcaagcgccgcggtctgctgactggaagagtggccacggctattggctttctccgccatcgcctgctcaagagtggtttcgtggaccatcacatccgcgccgcgcgccatctccagcgcctgcgggcagggggcggtatcgccaaagatggccagcgttttacccggcgtcgatggccccagatagcggctaccgtcaatgacccggccatcttccagctcaacacgctggccgagcttgagctgatggaacagcggccccggacgcacgccatcggcaatcagttgggcggcattgagcgttccgggtttgtcatgctgttcgatgcggtagccgtagcactccaccggatgactgagcgggtacgcgctgacccgatagccgtcttcgtcgaagaccaggccggggccgacttcaatgatagtgagcggataatcggtccatgagccgctcaggcgcagcgcggtttcgatgaattctttaatcccttttggcccgtaaaccgtcagcggtagcgagtttccctgcatcgagcggctgcacaacaggccgggcaggccgaacagatgatcgccatgcaggtgagtgatgaaaattttattcagtttgcctgggtggtaaggggtatggagaaactgatgctgggtgccttcgccgcagtcaaacaaccacatttcagcgctggtaggttgttgcaaattcagtattatcgacgtcatattacgcgtacgggtcggcacgccggcagatgtccccaaaaatgttaattccatcgtccagtgtcctcaggcgagtggtaaagcatcagtatatcaataaggagtcacaaatgatgacctggcaggatttacatcacagcgagctcaccgttgcccaactgtacgccttgctgaagctgcgcagcgcggtgtttgtcgtcgaacaacgctgcgcttatcaggatgtcgacggcgatgatttagtcggtgagaaccgccatctgctcggctggcgcgacggagagctggtggcctatgcgcggatcctcaaaagcgaagaggagttcgaaccggtggtgatcggtcgagttatcgttagcccgtccgtgcgcggcgagaagctgggctaccagctgatggagcaggcgctggccagctgccggcagaactggccgcagaaggcgatttatcttggggcgcaggcgcatctgcagaaattttatgccagctttggttttgtgccggtgacggacgtatacgatgaagacggtattgcccatatcggtatggcgcgtgacatcacaactcattaagaagctaaatagtaatagcgtatcgctatcaattatctatacttttcctcctgtagcgaatccagtggctggcgttcgccgggcctgttaaggttcgctccctcatgatgggtactgctatttatcgcagctaccctttataatgtggggtttttaatttcgtggaggttcgcgtgctgtctgtttccaccgcgctggaaagcctgttgggttgcctggctgaagatttccctccgtcacccggcacgcgaatttttgatatcccattcccgttaaacgacgccttcgacccgttactgtggtgcgcgcgccagccgtgctggccgcaattctactggcagcagcgtaacggtgatgaagagctggcggcgctgggggcggtaaccacctttgcctctttgtccgcggcgcatgattttttatgcgcgcaggggcgggaagatctgcgtatcagcgggctgaatgcgttcgatccgcagcagggcaatctgtttctgccgcggctggagtggcgccgcctgggcggtaaagcgactttgcggctggtggtacacagcgcgacctcgctgcttgacgatgcggtggccgcgcggacgtttcttcaatcattaaatagcgagcaggcgacggcggcatcgatgccaccgctgcaaagtgagcagcatgcgccggaatacccgcagtggcgtgagctgattacgcaggcgacgcaggcaatcggcgccggcgaaatggataaggttgtgctggcgcgggtcacggatttacgctttagcgcgccgctgcaggcgtttgccattatggcggccagtcggcgcagtaatcttaactgtttccacttcctgatggcctttagcccgcagcaggcgtttctcggctccacgccggaacggctgtggcggcgacgcggcgcgctgctgcgtaccgaagcgctggcgggcaccgtcgctaaccatcccgatgacgcccgggcgcagcagttagccgattggctaatgaaggacgataaaaaccagcgggaaaatatgctggtggtggaggatatctgccagcgtttgcagagcgagtcgccgacgcttgacgttctgccgccgcaggtcgtacgcctgcgcaaggtacagcatctgcggcgctgtatctggagtgaactggccaaccccgacgacagccgctgcttgctgcagctgcagcctaccgcggcggtggcggggctgccgcgccaggcggcgctggccttcatccgtcgtcatgagcctttcgcccgcgaatggtatgccggctccgcaggttatctttcactggcgcaaagcgagttttgcgtggcgctgcgttcggcaaaagtcgaaaacgacactctgaggctgtatgccggggccggtattgtcagcggatctgacccgcagcaggagtggcaagaaatagaaaataaagcggcgggattacgaacgttattactttcagaaacgtagagagacgacgtatatcaaaacggcgcaactctgccttatctatacttagcatcaatatttgataccggacaatttcatgtcagtaagcgcatttaaccgacgctgggcggcggtgatccttgaagctttaacccgccacggcgtgcagcacatttgcattgccccaggctcgcgctcgacgcccttaaccctggcggcggcggaaaaccgcgcttttattcatcatactcattttgacgaacgtggtcttggccaccttgcgctgggactggcgaaggccagccgccagccagtggcggtgattgtgacctccggaaccgcgaccgcgaatctctatccggcgctgattgaagcgggcctgacgggtgaaaaactgatcctgctgaccgccgaccgcccgcctgagcttatcgactgcggcgccaatcaggcaatccgccaaccgggaatgtttgcttctcatcctgcgcagaccgtttctttactgcgtccttcgcaggatatttccgcccgctggttggtctcgaccatcgatcaggcgctgggcgagctgcatgccggcggggtgcatatcaactgcccgttcgctgagcccttgtatggcgatatggacgataccggactggggtggcaacagcagctcggcgactggtggcagagcgataagccctggctgcgtcaggcgctgcagatggaaagtgagaaacagcgcgactggttcttctggcggcaaaaacgcggcgtagtggtcgcgggcaggatgagcgccgcggaaggtaaaaaagtggctgaatgggcgcagaccctcggctggccgctgattggcgatgtcctgtcgcagaccgggcagccgttgccatgcgccgacctgtggctgggcaacggtaaagcggtcagcgaactggcgcaggcgcaaatcgtcgtgcaactcggtagcagtctgaccggcaaacgcgtgctccagtggcaggcgacctgcgagccggatgaatactggctggtggataatctgcgcggtcgcctcgatccggcgcagcaccgcggtcgccgtctgctctcaagcgttgagcgctggctcgaactgcatccggcggagaaacgtcagccgtgggcgacggtgatcccgcagcttgccgggcaggcgtggcaggccgcggtcgccagcaacgagcctttcggcgaagcgcagctggcgcagcgcattcggcgctatttgccggatcagggacagctgtttgttggcaacagtttagtggtacgcctgatagacgcgctggggcaattgccggcgggttatccggtctatagtaatcgcggcgccagcggcatcgatggcctactggcgaccgccgccggcgtgcagcgggcgagcgcccggcctacgcttgcgatcgtcggcgatctttcggcgttatacgatctcaactcgctggccctgctgcgccaggcgtcggcgccgctggtgctgatcgtggtcaataataacggcgggcagattttttctatgctgccgacgccgcaggacgagcgccgtcagttctatttaatgccgcaggacgtggatttcagccacgcggcggcgatgtttggtctggcttatcaccgccctgatgactggcagtcgctggatgaggcgctggcaggcgcgtggcgccgcgccggggctacggtaattgagctggcggttaacgagaccgatggtacgcagactctccagcaactgctggcgcaggtaagtcgcctgtgacgctcaacgcggcggttgaaaacggccagccgggttatccctggctggtattcctgcacggcttttccggagaccgcgacgagtggcgtacggttggcgaagcgtttccggcctggccgcggctgtatctcgatctgccggggcacggcggatcggcggatatcgcggtcgatggctttaccggggttagcgaattactgcaggctacgttaaatagttacaacatcctggattactggttggttggctactccctgggcggccgggtggcgatgaacttcgcctgccagccgcgcgcgggcctgcgcggcctgatcgtcgagggcggacatccgggcctgcaggacgaagcgtcgcggctggcgaggcgtggcaatgatagcgcctgggcggaacgttttcgccgcgagccgttagcgcaggtcttcaccgactggtatcagcagccggtcttcgcttcgctggatgcggcgcagcgcgcgtcattggtcgccctacgtcgccgcaataacggcgctacgctggcggcgatgctggaggcaacctccctagcccggcaggccgatttgcgcccgtctcttcaggctcgcgattttccttttcactacctgtgcggcgaacgcgacacgaagtttcgcgccatcgcgcaagcgctcgccgccgatatccatatcattcaccatgccggacacaacgcgcaccgggacaaccccgcggcggtgattgcctgtctggcgcagattctggcaagttaactgaaggacattctatgatctctcttgatgaagcaatgctctacgcccccgttgaatggcacgattgctcagaaggctataccgatatccgttatcaaaaatcgactgacggaattgctaaaatcactatcaatcgtccgcaggtgcgcaacgccttccgtccgctgaccgtcaaagagatgattcaggcgttggcggatgcccgctatgacgacaatatcggcgtcatcgtactgaccggtgaaggcgataaagctttctgcgccggcggtgaccagaaagtccgcggcgattacggcggctatcaggacgactctggcgttcaccatctcaacgtgctcgacttccagcgccagatccgcacctgcccgaaaccggtagtggcgatggtagccggttactctatcggtggcggccacgtactgcacatgatgtgcgatctgaccatcgcggcggacaatgccatcttcggccagaccgggccaaaagtcggctcctttgatggcggctggggcgcttcctatatggcgcgtatcgtcgggcagaaaaaagcgcgcgaaatctggttcctgtgccgtcagtacgacgcccagcaggcgctggatatggggctggtgaacaccgtggtcccgttggcggatctggaaaaagagaccgtgcgctggtgtcgtgaaatgctgcaaaacagcccgatggcgctgcgttgcctgaaagcggcgctgaacgccgactgcgacggtcaggccgggctgcaggagctggcgggtaacgccaccatgctgttctacatgacggaagaagggcaggaaggacgtaacgcctttaaccagaaacgtcagccggacttcagcaaatttaaacggaatccataatgcgcgtttcgcaggtttaccgctggcagataccgatggacgcgggcgtggttctgcgcgaacggcggttaaaaacccgcgacgggctgttcatccgcctgctggagggtgaacgcgaaggctggggggaaatttctcccctgccgggattcagtgacgagacgctgggagaggcgcaaatggcgctgctggcgtgggcgcgggcctggcgcgacggcgccgagccgccgcttcccatgcagccctccgtcgcttttggtattagctgcgcgcaggcggagcttggcggcgaactaccgcaggtagcggattatcgcgcggcgccgctctgttccggcgacccggatgaactgttcgccaaactggcgacgatgcccggtgagaaagtcgctaaggtgaaggtggggttgtgggaagcggtacgcgacggcatggtggttaatctgctgctggaagcgatccccgacctgcagctgcggctggatgccaaccgggcgtggacgccgatcaaagcgcagcagttcgccaaatatgttaatccggcctatcgccaacgcattgcctttctcgaagaaccgtgcaaaagccgcgacgattcgcgtgaattcagccagcagaccggtatcgctatcgcctgggatgaaagcctgcgcgaggcggatttccgctttgtctccgagcccggtgtgcgcgcggtggtgatcaaaccgacgctgaccggcagcttacaaaaggttcagcaacaggtcgccgcggcgcatgcgctggggctgagcgcggtgattagctcgtcgatcgagtccagcctgggattaacgcagctggcgcgggttgccgcctggctgactccgcagactatccccggactcgacacgctggcgctgatgggcgcgcagctggtgcgggcgtggccggagagtacgctgccaatttttcatgctgatgagctggagcaactgctgtgatgttttccgattggccgtggcgccactggcgtcagttacgcggcgagtcgcaggcgctacgcctgaatgaccaggcgttgacctggcgtgagctatgcgcgcggattgacgcgctggcatctggttttgccgcgcagggcgtattggaaggtcagggcgtggcgctacgggcctacaaccagccggagacgctactcgcctggctggcgctgctacagtgcggggcgcgggtactgccgcttaatccgcagttgcctacggcattgctgcaggaactgttgcctgcgttaaccatacagcatcaactggtgcttaacggtgatacgctgccggggaatttaccggcgttaactctgcaggcggcagaaggcgcctgtgccgtttgctggcatggcgaacggctggtgtcgatgacgttaacctccggctcaaccggcctgccgaaggcggcggtacatagtgccagcgcccatctggccagtgccgctggcgtgctggcgctgatgccgtttgccggggaagacgactggctgctgtcgctgccgttgttccatgtctccgggcaggggatcatctggcgttggctgctggctggcgcgcggctgacggtgcgcgacaaacaaccgctggagcaagcgctgcggggctgtactcatgcttcactggtaccgactcagctatggcgcctgctaaatggcgatgccgatgtttcactcaaggcggtgctgcttggcggcgcagcgatccccgtcgagctgaccgaaagggcgcgagcgcaggggatacgcagtttctgcggctatggcctcaccgaattcgcctccacggtctgcgccaaagaggccgacggcgcggcggatgtgggcgaagcgctgccgggcgggaggtgaaaattgtcgccggcgagatctggctgcgggcggcgagcatggccgcgggctactggcgcgatggtcaactgttgtcattaaccaatgatgaaggctggtttgcaacgcgcgatcgcggcgagttacgtgccggtcggctgtcggttgttgggcgactggataatctcttttttagcggcggcgaaggcattcagccggaggaagtagagcgcgtgatactcgcccatccgcaggtgcaacaggtgtttattgtgccgcaggatgatgttgaatacggccaacgtccggtggcggtggttgaatgcgaggacggctgcgaaatggctacgctggcggcatggagtgctgaacggttagcgcgtttccagcagccggtacagtggctacggctgccggaaacgttaaagaacggcgggattaagatttcgcgccgggcgctgcgcgaatgggtcaactcgccggtttagccgatattggcctcggcgcggcgctggcgctgtttacgtctcagacgcagcagcggcggcaccaccaggacggcgacagccagcatcagcaatgttttggtcacgccgctttcccagaggatagccagattaccgttgctgatcgacagcgcgcggcgcaggttctgctccagcatctcgcccaacacaaaaccgaggatcagcggcgacatcgggaagtgcattttacgcatgatgtagccgagcacgccgaggccaaccattagcaacaggtcaaaggtggtgctgtgcaccgcatagacgccgacggcggaaacggcggcgatggctggtaccaggaaccatagcgggatcgtcagcatgcgggtgaacaggccgatcagcggaatgttcataataagcagcatcacgttggcgataagcagcgcggcgatgagcccccagacgatatccggctgttcggtgaacatcgtcgggccgggcgtaatgttatacagcgtcagcgcgcccatcatgaccgcggtggtaccggagccaggcacgccaagcgtcagcatcggaataaacgaaccacaggcagaggcgttattcgcggcttccggcgccgccacgccgcgaatatcccccttgccgaagttatcgctgttgccgctgatttttttctccgtcatataggtgatggcgctggcgatggtcgccccggcgccgggcagaataccgacaaagaaacccaccacggaagaacgcagggtcgcgccgacgcactgcgcggcctctttggtgttaaatagcatgcgcccggttttacgcaccagcgtttgcccgccgctggtgctctccagcatcaacaggatttcagaaacggagaacaggccgataaccaccacaataaactgaacgccatcggagagatggacgctgtcgaaggtgaagcggtaaaccccggtgttggcatccacgcccaccgtcgccaggcccaaaccgattaacgccgcgaggaacgacttcagcgggttttgcgccatcatgctgccgaggcaggcgatggcaaacaccatcagcgcgaaatattccgccgggccgaacgccagcgaccactgggcgagcagcggcgcgaacagaataatgccgccgatcgcgataagcgaaccgaagaaagagctgacggcggaaatcgacagcgcgacgccgccgcgcccttgctgcgccatgggatagccatcaagcgccgtcatgatggcggcggcatcgccgggcacgttcagcaggatagatgaaatacgtccgccatattcgcaaccgatatagaccgtcgccaacagaatcagcgccgattctgcaggcaggtgtagggcaaaggccagcggcagcaggatggcgacgccgttaatcggcccgaggccgggcagcagcccgacgatggttccgacaaagcagccgatgagggcgataagcagattttccggcgtcatggcgacggcgaaaccctgcgacagatagatccaggtatccataagcttctccgttaatttaaccagacgccaagcggcagagtcacatcaagtaaggtatcaaaggcgtaccataacgagacgcccatcaccacgccggcaatacctgccgccggtagcgtggcgccgaacagcaggccgatcaccgccgtcagcagcgcggtcgccagcggaaagcccagccattcaaatccccaggcatagaccaccagcaccacaaccatggttaacagccgttgcagtacatgtcgtcccggccactcgatggcgtccgggcgacgcagcagcatcagcgctgaacacagcagcatcaggccgataatgcccaacgggaaagggcgcgggccgacgggttcatacgagtattcgctgtggatctgccaggcgataaacaggccgccaatgcataacaacagccagactccggcaaagatacgatcgctcattagcgcctccgcggattatttagccaggccaaaggctttcgcctgttcgcgataatcgctgacctgctgttttacataggtatcgagttccttgccgttcatgttgaattcaaacaggccgcgcagttcacgttgctttttgaactcatcggtttgctgcagtttagtgaattcatcaacccaccactggtagtcggcatcgcttactttcgggcccataaagaagccgcgaataatcggccagaccaggtcatagccctgctctttagcggtagggacatcagccagcgcgcccggcagacgttcgttggagaagaccgcgaggacgcggatcttatttccctgcaggtacggcaccatttcactcagatcgccggagaccgcctgtacatggttgccgagcagggcggttaccggctcgccgccgccctcaaaggcgacgtagcgcatcttgtgcgggtcaacgttggctttttgcgccagcagcgccgctttcatccagtcctggctaccgatggaggccccggcgccaatgacgatagtggcgggatttttctccattgcgctcataaatgacttcaggtctttccatggcgaatcggcgcgcacggcaatcatgccgtagtcggtaccgacgctggccagccagcgtacgtcatcaacgccgtagcggccgaatttcccctgtgacaaattcaacagcgagccgccggaaaaggcgaccacggttccggcctctgccgggcgctgggcgacgatggcgttgtaggccaccgcgccgacgccgccgggcatataggtaacgcgcatcggtttctcgatcgcgccggtttccatcaggctcacctgaatcagtttacaggtgaggtcaaagccgccgccgggtttggcgggcgcgatacattcggtgcgggacggggcttgcgccgcgaaagcggtggttgtacagaggcacagcgcgatggcgctaagatggcggaaaaatggcgttttcataggcttcctcagtaggtacagggaatgtttttctgattatgtgaaccgacatgtggcgattcggttgcgtgattgttaaaacagttacctttcatttccctttcaatgcggcagcaactttacaggatgtgatatgcgtctcttattagccgaggataaccgtgagctggctcactggctggaaaaagcgctggtgcagggcggttttgccgtggattgcgtttttgatggccgggcggcggatcacctgctgcaaagcgaaaaatatgcgctggcggtgctggatatcggtatgccgggcttagatggcctcgaggtggtacagcggttgcgtaagcgtggacaaacgctgccggtgctgctgttgactgcgcgcagcgcggtagcggatcgggtgaaagggctgaacgtcggcgccgacgattacctacccaaaccttttgagctggaggagctcgacgcccggctgcgggcgctgctgcgacgcagcgaagggcaggtgcatgaggtacagcagcttggcgagctggaatatcgcgatgagggctattttctgctgcgtggtgagatgttgtccctgacgccgcgcgagctggcgctgttgaaagtgctgatgtttcgccgtacccgtccggtttcccgccagcagctatttgaacaggtgtttagcctcagcgacgacgtcagtccggaaagcatcgaactttatattcaccgcctgcgcaagaaactccagcagagtaacgtgcgtatcactacgctacgcgggctgggttatctgctggagtgtgagccgcatgaaatggggtaaaccgcagtcgctctatgcccagttgctgctgtttctcggcctgccgctggcgctgttgtgggggctatcggcattcaatagctacgtgagcgcgctgcaggcggcgacgcaggcttacgatcgtacgctgctctcctcggcgcgcaccgtagcggagcggctggtggtgcgtggcggccatctggaggtcaatgtgccctgggtggtgctggacagctttgaactcaacatgaacgaccggctgtattacaaggtggtcgacccgcaggggaaagtgatctccggttttgacgatctgccggcgatgccgccggccacttcacgaacccagctctacccggcgctggcatggttttatcataccgaatatcgcggccaggcaattcgcgtggcgcgcctgctacaaccggtcaacgaaggcggcatcgtcggaatggcggagatttatattgccgaaacgctgcagtcgcggcgctggctggccggacaactgctgttctcatcctgggtatcgcagggcttattagtgctgttgacgttggtactggcggggtggctactgcgccgcgttctgcggccaatgcgtcagctctcggcgctgatggtgcgccgcgaacccggcctgctgacgccgctaccggaattgttgccgtggtcggaaacgcgtctgctgatcgtggcttttaatcgctatatcgaccgcctgcgggtcatgatctcccggcaggaacgctttagcgccgatgcttcacatcagttgaaaacgccgctggcggtcctgaaaacccaagcctcggtagcgctggccagcgacgatccgcggctgtggcgcgagagtttgcaggccatgcgcgcgacgctggatgatacgattttactcaccgaacgtttgttgcagctggcgacggtgaaacgcagggagcagggcgagcaggcgtttgccgcggtcgatctgcaggaggtcgtgcaccatagctgtttttcgcgtattgcgcaggcgcgcagtaaaaacatcgatctgggttatgaaggtgaacagtcgccggtgtacgttttgggtgatggcgttttgttgggcgagctgtgcgccaacctgctcgacaatgcgattcgctacaccccggcacgcggaacggtgacgctgagcctgcatcgcgatggcgaagccgtcacgctaagtgtcgaggatagcggtccgggcatcgaggaaaacctgattaatcaggcgctgacgccgtttcgtcggctggagaatggcggcggcatacccggcgccgggctgggcctggcgctggtaaacgatatcgcgcgtctgcatcgtagtcggcctcagctgtcgcgcagcgaaagcctggggggattaaaggtgacgctgcgtctgctgaccgtgagctcagagtagccctttctggctgagggtgaggcgggtggcggcattaagatcgtaatgttgaaggtcttcgcccttcacccaggcgtaatcgtcgaattcctcgttgatcgtgacctcgcggttggcgcttatgcaatcgaaaatcaaatagatcatgtagatctcttcctggcgaccatcggcataggttttcacgcgggtatcatcgcggaagctccatggcgtgattcgggtcaactgtaatttttcgccaagctcctcgcggacttcacgtcgcagcgcctcttcaatagtttcccccggctccacgccgccgccggacagcgcccactgtccgggaaaaaccccgcggtcggcagccatcttgcacaacaggtaatggccatcattttggattagcgggcaaacaatcgtcctttgacgcatgatttttctccttcgcagtaagtcgggccgggtatcgaggaaacagtttgcgaggcgcctcggcaaaccgcaagggaaatacggcgctggcgctacagagtgctaagttaagcgaaaattatcgtatggagagccaccatggaaaggaccacccattccccacatgacgccgtgtttaaacacctactgtcgcatcgggcgacggcgcgggattttctggacattcaccctcctgaacatttgcgagaattatgcaatctgcaaacgctgcagttggagtccggaagttttatcgatgaagacctgcgcgccagccattccgatattctttactcgctgcaaacccaggcgggggacggatatatctatctgcttatcgaacatcaaagctctgtggaccgtcatatggcatttcgcctgatgcgttatgcgatagcagcgatgcagcgccatctggataaaggacatacgcaactgccattggtgatcccgctgcttttttatcatgggcaagtttcgccctggccgtatcccatgtgctggctggaaggatttgctcatccgcaaaccgcgcggcaagtatacaatcaggattttcacttaatcgatatcacggtacttcctgacgatacaataatgcagcaccgacgggtcgcgatgcttgagttgctgcaaaagcatatccggcaacgcgatatgatggaactgcaggagcaactagccagcctgttggcgctgggatacactagccgcagacagctcaggacgctgcttcactatttattgcaggcaggaaatgccgccgatccggtcgcctttttacgtaatcttgcgcaaaatgtccccagacggctgcataaggagacgctaatgaacattgcccagtttctggaacaacgcggccatcagcagggcctgcagcaaggtcttgaacagggagaacaattggctgcgcaacgtattgcccaggcgatgctggaaaacgggcttgatctggcgctggtggcgaagctgacggggcttgcgccggagcgcctggccctgctcgcccattaatttttctgcttccttcaaacagcctgcgcgacggcgattgcgcaggtaaatatagatttatttaatcaatgcaacctaattaaatataattccgctgaatttgaattcggtggaatttactttctttcgcaactgcgcggcggtattgctgtaaaaagacgcaactggttacactcttgtgaaaaatcatttcgccaggtcattgattcctgacgggtgcgcagtagaattttctggttttttcgggacttctttgattcttcttttctggatagagtaaataatgaaaaagagcatttttatggccctggccggggtaatgatggtttcctcggcggcccatgctattagcgttaccggcgaagctggcgagcactataccaacctcggcgttggcttcggtaccgaatccaccggcctggctatttccggcaactggttgcatagcgataacgacggcgacgccgctggtttaggtctgggtctgaatattccgctgggaccattcctggcgaccgtgggcggcaaaggcctctacaccaatccgaagcagggtgatgagggttacgcggcagcggtcggcggcggtctgcagtggaaaatcggcgatagcttccgtctgtacggcgactattactactcgcctgattcactctccagcggcatcgatagctatgaagaagctaacgtcggcgccagctggaccattatgcgtccgcttagcatccaggcaggctatcgctacctgaacctggcgggtaaagacggcaaccgtgacaacaccatcgccgacggcccgtacatcggcgccagcgccagcttctaatcctccggcgcggccttccgccgcgccaaatttcttcgtcgccagcctgcgcctttgcgctatagtaattcgacttatcaggctggagttcataatgctacaagtggaaatgctgtccaccggcgatgaagtgctgcatgggcagattgtcgataccaatgccgcctggctggcggattacttttttaatcagggtttaccgttaacgcgccgcaataccgtcggcgatgacctcgacgcgctggtggctattttgcgcgaacgcagcgaacaggcggatgtgctgattgtgaatggcggcctggggccgaccagcgacgatcttagcgcgctggcggcggcgacggcgaaaggcgaagggttggtcctcaacgctgaatggctggagacgatgacgcgattctttgccgagcgcggtcggccgatggcggaaagcaatcgcaagcaggcggaaatccccgccagcgccgaaatgatcaataatccggtgggtaccgcctgcgggtttgccgtacagctcaaccgctgcctgatgtttttcacccccggcgtgccgtctgaattcaaagttatggtcgagcaggagatcgtaccgcgtttacgtgcgcgcttcacgcttccgtcgccgcctgtctgtctgcgtttaaccaccttcggacgttcagaaagcgagctggcgcagagcctcaatcacctgcagctcccccgggtgtggtgatgggctatcgctcgtcaatgccgattatcgaactgaagttgaccggtcccgcgacgcagcgcgatgcgatgctggcgctgtggccagaagtgcataaggtggccggggagagcgttattttcgagggcacggaaggattaccggcgcagatcgcgcgttgcctgcaggagcgtcagcttagcctgaccttgagcgaacagtttaccagcggtctgctggcgctgcagctgaggcgggcgaacgcgccgcttctcgccagcgaagtggtgccggcgcaggaggagaccttagcgcaatcggcgcgctgggccgccgagcggcgcgttaaccattttgccgggctggcgttgtcggtcagcggtcaggaggccgattacctgaactttgtgctggcgacgccggaaggtacgcacgcgctgcgggtcaagttcagcgctaatcgtcacgggctgccggtacggcaagaagtctgcgccatgatggcgctgaatatgctgcgccgctggctcaacggtaagccggtcagcggcgagcatggttggatcaacgtcgtcgagacgctgtttatcgactgattcaggcaggcgcgcccagcgcctgcgccagcagagtaatgggatgttcacagcgcttgctggtggacatctcaatctgccatttacaggtttcgcaatcggtaatcactaagtccgcgccgctctcctcaatctgacgaaataatggcgcgccaatcgcctgcgccgacgaatagttttccgacttaaagccgaaggtgccggcgataccgcagcactgcgaatccagtactttcagctgtaggcccgggatttggcgtagaagctcaagggtgtataacgaccagcccattttttccatatgacatggggtgtgatagaccaccttcagcggcagcgggcgcaatggaagagttttgccggcatcgagctgtttccaaatccagcgggtcgctaactccacccgatcccgcagatcgctgttatcgatatccaggagatgggggtattcatcgcgcagggtaaaagtacaggttgaagaggtggcgatgattggcaaggtgttttcgcgcatggcggcgacgttgctgtgcgcttgcttgcgtgctttgtcaaaaaagccgttggcgataagcgggacgccgcagcatttttctttcgataagagctgcacgccggtacccagcgcgttgacgacgcgaatcagatccttacccaattgcgggtggttatagttgacgtagcagccatggaagaaagccacttgctcgccgtactgcgcctgtccggcggcgagctggcggtaagcgcggcgaaaggtgccgaagccatatttcggcagcgtgcggcgatggtcgattttcagcgccgtgtcgagcaggcggcgcactggttttaaccccgttgtggcgttgaccagcggcgcaaaaggcgtggaaagggtgcccatcaggtcggtatggctgaggatggcatcgcgcagagtcggtgtttgctggctgtactgcgcacgcgcgcgttgaataatatcgccgattttcacatcagatggacaggccacctcgcagcgtttgcaattaatacaatatttcagcgcgtcgtcgtacagcgcgccatctttcaaacgcagacgttcgccgtccggccccgcctgtttcgggccgggatagcgcggatttacccggctcaccgggcaggcggtggtacagaccgtgcattttatgcagctttcaaagcgggtgtcgttcatggccggcctcctgcaaggtcgtggatctgtctggcggcatgaagcgcggtgacggcgcaaacgccaccgccgcagccgagttgaatggcatcgaaaccgccgagcagcgagccgatagcgaaaagattactcagcggctggccgagcaggtgtgggcgcagcatgtggtccgtcttcaaaccaaagcgctgccacggttgtgacgcgaagaaatcacgctgataccagctatcgcgcgccagcgtttgctgcagatcgaggccgagaatcggttcgcgcacgctatcacgggtggcgacgagaccgttactgaaaaagctaccgctcgccagcacggtaaagcgcgggcgcagcgcgacatcgccgtgatttcgcgtccatacggcctcgacggcgccctgctgatggctgattttcaccacctcgtcaccggcaagccaggtaccaccggtgcgaatgaactgatgctgaagctggctatgcaggcgcatccccggcaccgaaggcggcagcgtcggcagcaggcgcagtgggcagggtagacgttcttgtaaccaacgccagagccgattatccgcgagcccaaaacaggcgggcatcattatcagctggtactcttgcgccagcggcagcagcgcggactgcagggcaggccacagattttcatcatcaagcacgcgggcgatgttggcggcacggaactccgtagggttatcgcgcagcacatcaagcagcggtaaatcaatctccgccgcgtcggcgtccactccgctctgtccgagggcggcggcggccaggtgcggctgaaaatcggcaaaaccgctaatccctaccaggcatacgcgttgctgcgcgaagggcgccagcggaacctcttccggcgatagccacgccggtcgcaacgtccccagcggcgtcacccgcaggtgcggtcggcgcgcttcgccttgcatgttcgcgccgcaggcggccaacagcgtttcggtatgcctggcgtattcgagcaccgcgtcggcgccgagacgggagtagggatgttcagggagctgaacggccagttgctgaagaccttgtgcgacatcagtaacgttttcaccgttcggcagcgccgagagcaggtctaatgaagcagaggaaaagtgcagcgcgctttgcccgcggctgattatcacgcagcgtaggccgtactgattcagcgtcagcccgcataacagcccggccagtccgccgccgacgatggcgcaatcaaatttcatcctgatgctccttttgcagtccgcataagccgaggtagacccagcgggtaaattcactttcgcgcagcgcgtcgccccaggcgatgggctgaacgcccttccagcgctcattaagaaattccgacagctgagttaacgactgcgccggggtggcgacgttaaagcgctggagcagtccggcggcgcggcaggcgcacagttcaccctggcaggtgcccataccgacccgggtacggcggcgcaggtcgagcagattcttcaccgccagattctctaccgcgtactgcacttccccggcggtgaccgcttcacattcgcagaccaggctacggtgctggcggctgtcgccgagccatgccggggtgcggtcgccgtggcgatagaccgccgacccgcgcagcggcgtcggtagcgagataatctttttcagcgtggtttctgtggcttcctgcgaacccggtagcgggcgctccgcggtgcggcacggctcagcattgccgagtttgcggcagacggcgtcgctggcccattccgccatcagacggtaggtcatcaacttaccgccggtgatggtgataaagccctccatgccgtcgcgctgggcgtggtcgagcaacacaataccgcggctaacgctgcgcccgctgggatcgtcatcgctggcgaccagcggacggacgccggagtaggcgcgcagcacccgggtgcgccccatgatcggcgccagtttttcaccttcgcgcagcagcgtatcgacctcttccgtcgtcacccggttatcatcgatctcgtcataaggaatatgcgtcgaggtggtgcctatcagcgagatggtatcgccgggcaccagaatatcggcatccgccggcttgcggcagcggttaatcacctggttattaatgcggtgatcgaggatcagcagcgagccttttgccggaaacatggagatgcgcagatcggcgtattccgcgatgcgttggccccagatcccggcggcgttgacgacgacctgcgcgtgaatgctacgcgcttcacgacgttgatgatcgtagatctgtactccgtacacacgatcgccctggcgcagcagaccggtgacctcgcagccggtaaggatctgcgcgccgtgttcgcgggcgtcgagcatgttggcggccgtcaggcggaacggatcgacggtgccgtccggtacctgtacggcgccaagcagcgtagggttcaccgcaggctccaggcgcaatgcttcagcgggggtaagcggtttagcatcgataccggcctgctgacaagcgtggatgaaggtttgctgccaggccatgtcatcttcaggcagggtgataaacagcccgtcagtgggttcaatgcagtggcgggcgatgcgacgcaaaatacgattttcgttgatacattcgcgcgcggattcgccatcggtgacggcatagcgcgcgccgctgtgcagcagaccatgattacggccagtggcgccggtggcgatatcgtgccgctcaattaacgccacgcgtaacccgcgcagggcgcagtcgcgggcgattcccgcgccggtggcgccgccgccaataattagcgcatcaaattcttgcgtctcggccattttccggtccctctactttcgttttacaccatttagccatatcaatagtgtggaatgtttgatttcgagcatatttgcgcgcaattcgagcgtttgctgtgattttgtgctcacattggaaaatattgtcatatatctgtaacaaaatgtgcgatatttcacagtattagttctacgctttgcctaccatcgcgacctaattagaagtgcgtgaataaattagattttttgcgtcgatgtcagtgaaacagcaatggccacggaggctgatatgttaagtatttttaaacccgcagcgcataaagcgcgtttgccggcggcggaaatcgacccgttgtatcgtcgattacgttggcagatctttattggcatcttcttcggttatgccgcttactatctggttcgtaagaactttgcgctggcgatgccttatctgattgagcagggcttctctcgtggcgatctcggcttcgcgctttccggtatctctatcgcctacggattttcgaaattcatcatggggtcggtctcagaccgttcgaatccgcgcattttcctgcctgcagggttaattctggcggcgctggtgatgctggtgatgggcttcgtgccgtgggcgacttccagcatcatgatcatgttcgtattactgttcctttgcggatggttccaggggatgggctggccgccgtgtggtcgtaccatggtgcactggtggtcgcagaaagagcgcggcgggattgtctcagtgtggaactgcgcgcataacgtcggcggcggtattccgccgctgttgttcctgctggggatggcgtggtttaacgactggcacgcggcgctgtatatgccggctttcggcgcgatcctgctggccatttttgccttcgcgatgatgcgagataccccgcagtcctgcggtctgccgccgatcgaagagtataaaaacgactatccggatgactatagcgaaaagcacgaagaagagctgacggcgaagcagatctttatgcagtacattctgccgaacaagctgctttggtacatcgcgatcgctaacgtcttcgtttatctgctgcgctacggcattctggactggtcgccgacctacctgaaagaggtcaaacacttcgcactggataaatcctcctgggcctacttcctgtatgagtacgcggggatcccgggtactttgctgtgcggctggatgtcggacaaagtgtttaaaggcaaccgcggcgcgaccggcgtgttctttatgaccctggtgacgattgccactatcgtttactggctgaacccgccgggtaatccgggcgtcgatatggcctgtatgatcatcattggcttcctgatttacggcccggtgatgctgatcggtctgcatgcgctggaactggcgccgaaaaaagctgccggcaccgctgcgggcttcaccggtctgttcggttatctcggcggttccgtagccgcgagcgccattgttggctataccgtcgatttctttggctgggatggcggcttcatggtgatgattggcggtagcgtactggcggttctgctgctgattatcgtcatgcttggcgagcgtcgtcatcatcaacaactgaaacaagcctaaggagcggcgatgaaaatgaaacttaccgcgctaatgagcggaatgattttggccagttcggcgctctgcttcagcgcgacagcggctgataaaatagtcatcgcccaccgcggcgccagcggttatctgccggaacataccctgccggcgaaagcgatggcttacgctcagggggcggattaccttgagcaagacctggtgatgaccaaagacgaccggctggtggtgttgcatgaccattatctcgatcgggtgactgatgttgcgcagcgtttcccgctgcgggcgcgtaaagatggccgtttttacgccatcgactttaccctggccgagattaagtcgctgaagttcaccgaaggttttgagccgaaagatggcaaaaacgtgcaaacctatcccgggcgtttcccgatgggcaaatccgatttccgtattcatacctttgaagaagagattgagtttgtacaggggctgaaccattcgacgggtaaaaatatcggtatctaccctgaaatcaaagcgccgtggttccaccatcaggaaggcaaagatattgccgccagcacgctgaaagtgctgaaggaatatggctacaccagcaagcaggataaggtttatctgcagtgctttgacgccaacgagctcaaacgcattaagaatgagctggagccgaagatggggatggatctcaatctggtgcagctcatcgcctataccgactggaatgaaacgcagcagaaacaggccgatggtaaatgggtgaactacagctatgactggatgttcaagccgggggcgatgacgcaaattgcgcagtacgccgacggtattggtccggattaccatatgctggtagcggaaggctcgaagccgggcggggtgaagctgacggcgatggtgaaagaggcgcatgccagccatctgcaggtgcatccgtacaccgtgcgcgcggatcagttgccggcgtacgcgactaacgttaatcagctctatgacgtgctgtataaccaggcgggcgtcgacggcttgtttaccgatttcccggataaagcggtgcagttcctggacgcgaaataaaacaaaagggccgtaaggcccttttatgttttccccctctccctgtgggagagggccggggtgagggcatcaggccgcacacatcgacaacacttacatctcgatctcaatatcgcctttcgcccggcagcagcagggcaaaatctctcccggctggataaacgccagcggttcggtcagccagtcaacctggcctgacaccagacgcgtgcggcaggaaccgcaatagccttcgcggcactgatactccacgtcgatgttatgcgattcaagcgcggccaacagagaaggatgttcatcctgacactcaaggcgagtgtcagaaatcctcaagaaaatccgcttcattacagctggaagttgctcagatcgtcggcatcgacttcagaatcgatctggccgacgagataagagctgacctccacttcctgcggcgcgacctgaacgttgtcggaaaccagccaggtgttgatccatgggatcgggttggagcgggtctggaacggtagatcgaggcccaccgcctgcatgcggatattggtgatgtactcgacgtactggcagagaatatctttgttcaggccgatcatcgagccgtcgcggaacagataatccgcccactctttttcctgctgcgccgccagcacgaacaggtcatagcactcttgtttgcactcttcggcgatttccgccatttccggatcgtcgctgccggagcgcagcaggttcagcatatgctgagtgccggtcaggtgcagcgcttcatcgcgggcgatcaggcgaataattttggcgttgccttccatcagcttgcgttcggcaaaagcgaaagagcaggcgaagctaacgtagaagcggatcgcttccagcgcgttgacgctcatcaggcagaggtacagtttctttttcagctcgcgcagattcacggtcacggttttgccgttaacggtgtgggtgccttcgcccaacagatgccagtagctggtcatttcgatcaaagaatcgtaatagtgagagatgccttccgcgcgtttctggatctgctcattggtcacgatatcgtcgaacaccgtcgccggatcgttgacgatgttgcggataatatgggtgtaggagcgcgagtggatcgtctcggaaaaagcccaggtttctacccaggtttccagttccgggatggaaatcagcggcagcagcgcgacgttcgggctacggccctggatggaatcgagcagcgtctgatatttcaggttgctgataaaaatatgcttttcatgttccggcagcgcctgatagtcgatgcgatcgcgcgaaacgtcgacttcttccgggcgccagaagaaggagagctgcttttcaatcagcttttcaaagatgtcatatttttgctgatcgtagcgggccacgttaaccggctggccaaaaaacatcggctcaagcagttgattgtttttcgtctgtgaaaaagtggtgtatgccatgagtgggtcctgttgagattgtatcgcccgacaacactgcgtttgccgggcctacaaaaccgtaggccgggtaggcatcgcgccacccggcaaaaataccttagatcttacatgcgccgctttcgcagccgtcgtcctgaattgacggggccaggtcatcctgggcgtcttccgcgccatcacgggtgttgtgatagtacagcgtttttacgccgaatttataggcgttgagcaagtccttgagcaactgctgcatcggcacttttccggacgggaaacgcgtcgggtcgtagttggtgttggcggaaatcgactgatcgataaacttctgcatgatgccgaccagctgcagatagccgtcgttattcggcatttcccacaacagttcgtaggcgttctgcagattttcgtaatccggaacgacctggcgcaggatcccgtctttcgaagctttgatgctcacgtggccgcgcggcggctcaataccgttggtggcgttggagatctgcgaagaggtttcagacggcatcaacgcggagagcgtggagttacgcagaccatgggttttgatagattcgcgcagctgctcccagtcgaaatgcagagattcgctcacgatcgcatccaggtctttcttgtaggtatcgatcggcagaacaccctgcgcgtaggtggtttcattgaaccacgggcaggcgccttgttcgatagccagttcgttggaggccttcagcagatagtactgaatagcttcgaacgttttgtgcgtcagattgttggcgctgccgtcggagtagcgcttgccatgtttcgccagatagtaagcgaagttgataacgccgatacccagcgtacgacgacccatcgcgccgcgtttggccgccgggattgggtaatcctgataatccagcagggcatccagcgcgcgcaccgccagtaccgccagatcttccagctcatcgaggctatcgatggcgccaaggttgaacgccgacagcgtgcacagcgcgatttcgccattttcgtcgttcacatcgtccagcggtttggtcggcagggcgatttccaggcacaggttagactggcgcaccggcgcgacaaccgggtcgaacgggctgtgggtgttgcagtggtcaacgttctggatatagatacggccggtagaggcgcgttcctgcatcatcagcgagaacagctcaacggctttaatacgctgtttgcggatgctgtcgtctttttcgtatttagtgtacagacgttcgaactcgtcctgatcggcgaagaacgcatcgtacaggccaggaacgtcggacgggctgaacagggtgatgtcctcgcctttcagcaggcgggtgtacatcagcttgttgatctgcacgccgtagtccatgtggcgaacgcggttggcgtcggtgccgcggttgtttttcaacaccagcaggctttcgacttccagatgccacatcggatagaagagggtggccgcgccgccgcgaacgccgccctgcgaacaggatttcaccgcggtctggaagtgcttatagaacgggatgcagccggtgtggaaggcttcgccgccgcggatcgggctacccagcgcacgaatgcggccggcgttgataccgataccagcgcgctgggaaacatatttcacaatcgcgctggaggtggcgttgatcgaatccaggctatcgccgcactcgatcagcacgcaggagctgaactgacgggttggggtacgcacgccggacatgatcggcgttggcagcgagattttaaaggtggacactgcgtcatagaaacgcttgatatagtccagacgggtctcacgcggatagttagagaacaggcaagccgcaaccagaatatagaggaactgggcgctttcatagatttcgccgctgacgcggttctgcaccaggtatttaccttccagctgcttaacggcggcataggagaagttcatatcgcgccagtggtcgataaaaccgtccatctgctggaactcttcttccgtgtagtcttccagcagatgatgatcgtatttacctttttcgaccatgttcaccacatgggtgtacagcgccggcggttcaaactggccaaacgctttcttgcgcaggtggaaaatcgccagtcgcgcggccaggtactggtagtccggcgcatcgcgggagatcaggtccgctgcggccttaataatggtctcgtggatgtcggcggttttaatgccgtcatagaactgaatatgcgaacgcagctctacctgggaaatcgaaacgttattcagtccttctgccgcccaatctagtacgcgatggattttgtcgagattgatacgctcggtgctaccgtcgcgctttgtcaccagcagactctgattcatgtggtttttacctgtccgtgagaaaaaatatccccccatttatccacagcaagtcgttgtgactaactctgtggataaatactatatgtagggggttgtcgataaaaagaacgctatatggtgagttattttagtaaggattcttttgagtacaagggttgattttgacgttaatttgaggttgcgcaggcgtaataatcgctaagtccacgccgtataaggcctggagaagaagtcaataaaacagaaaaaaaaatcaaaatttgatcgagtgctgatttcttcgtcggaagggaaaattgcgcagcttgatgccgcgcaatcatcatcataaaaacgtatgacgttatgcttttttcgccgttgtatgcaacatatagttaacatcaacgcccggcgccagcttgaaggtattggtgagcggattgtaatgcaggccggtaatgtgttgctctttcagaggagtctgatcgatccagccgatgagctccgccggcttgataaacttcttaacgtcatgcgtaccttttggcaccattttcatcacgtattccgcgccgaccacggccatcagccacgctttgccattgcggttaatggtcgagaagaagacctgtccgccgggcttcaccagccgcgcgcaggcatgcaccaccgattgcgggtcagggacgtgctcgagcatctccatacaggtgacgacatcgtactgctgggcgtacttggccgcgtgctcttcgacggtctcctgcacgtactccacctgaacgccgctctccagcgcgtgcagttttgcgacctgcagcggctcgaagcccatatccagaccggtgaccgtcgcaccttcgcgcgccatgctttcggcgaggatgccgccgccgcagccgacatcgagcacttttttgccgaacaggccgccggagcgttcggcaatgtagccaaggcgcaacgggttgatgcgatgcagcggtttgaactcgccttctaaatcccaccagcgcgaggcgacagcttcaaatttggcgatttcattgtgatcaacgttgggggccaccgacggtttttcggcattcatgggcgcttttactccttttctgttctgacctgcgagtatatcagcagactgccacgaataaaccgtattgctttacctctattacgacggctgtgttataatttgcgacctttgaatccgggacacagtagagggatagcggttagatgagcgaccttgcgagagaaattacaccggtcaacattgaggaagagctgaaaagctcgtatctggattatgcgatgtcggtcattgttggccgtgcgctgccggatgtccgagatggcctgaagccggtacaccgtcgcgtactatacgccatgaacgtattgggcaatgactggaacaaagcctataaaaaatcagcccgtgtcgttggcgacgtaatcggtaaataccacccgcatggtgataccgccgtttatgacaccatcgtacgtatggcgcagccgttctccttgcgttatatgctggtcgatggccagggtaactttggttctgtcgatggcgactccgccgcagcgatgcgttatacggaaatccgtatgtcgaagatcgctcatgagctgatggccgatctcgaaaaagagacggttgatttcgtcgacaactatgacggcacggagaaaatccctgacgtcatgccgacaaaaatccctaacctgctggtgaacggttcttccggtatcgccgtaggtatggcgaccaacattccgccgcataacctgacggaagtgatcaacggctgcctggcatacgttgataacgaagacatcagcattgaagggctgatggaacacattccgggcccggacttcccgaccgccgctatcattaacggccgtcgcggtattgaagaggcctatcgtaccggtcgcggtaaagtttatattcgcgcgcgcgcggaagtcgaagctgacgcaaaaaccggtcgtgaaaccattatcgtgcacgaaattccgtatcaggtgaacaaagcgcgcctgattgagaaaatcgccgagctggtgaaagacaaacgtgttgaaggcatcagcgcgctgcgcgacgagtctgacaaagacggtatgcgtatcgttatcgaagtaaaacgcgacgcggtgggtgaagtggttcttaacaacctctactcccagacccaactgcaggtttctttcggtatcaacatggttgcgctgcaccacggtcagccgaagatcatgaacctgaaggacatcattgctgcgtttgttcgtcaccgccgtgaagttgtcactcgtcgtactattttcgaactgcgcaaagcgcgtgaccgtgcgcatatccttgaagcgctggcgattgcgctggctaacatcgatccgatcattgaactgattcgccgcgcgccgacgccggcggaagcaaaagcgggtttaatcgcgcgttcatgggatctgggcaatgtctccgcgatgctggagcgtgctggcgataacgccgcgcgtccggaatggctggagccggagttcggcgtgcgtgacggccagtactatctgaccgaacagcaggctcaggcgattttggatctgcgtctgcagaaactgaccggtctggagcatgaaaaactgctcgacgagtacaaagagctgctggatcagattgccgagctgctgcacatcctgggcagcgccgatcgtctgatggaagttattcgcgaagagctggagctggttaaagaacagtttggcgatgcgcgtcgtaccgaaatcaccgccaacagcgctgatatcaatatcgaagacctgattaaccaggaagatgttgtcgtaaccctgtcgcaccagggctatgtgaaatatcaaccgttaaccgactacgaagcgcagcgtcgtggcggtaaaggtaaatcggcagcgcgtattaaagaagaagactttatcgaccgtctgctggtggccaacacccatgacacgatcctctgcttctccagccgcggtcgtctgtactggatgaaagtatatcagctgccggaagccagccgcggcgcgcgtggtcggccgatcgtcaacctgctgccgctggaagcagacgagcgtatcaccgcaattctgccggttcgtgagtacgaagagggcgttaacgtctttatggcgaccgccagcggtactgtgaagaaaacggcattgaccgagttcagccgtccgcgttctgccggtatcatcgccgtcaatctgaacgaaggggacgaactgatcggcgtcgatctgacttctggccaggacgaagtgatgctgttctccgccgctggtaaagtcgtgcgctttaaagaagacgccgttcgcgcgatgggccgtaccgcaaccggcgttcgcggcatcaagctggcgggcgaagatagcgttgtgtcgctgattattcctcgcggcgaaggggcgatcctgaccgtgacgcaaaacggttacggtaagcgtactgcggctgaagagtatccgaccaagtcgcgtgcgacgcagggcgttatctctattaaggtcaccgaacgtaacggttccgtggtcggcgccgtgcaggtcgatgattgcgaccagatcatgatgatcaccgatgcgggcaccctggtgcgtactcgcgtttctgaagtgagcatcgtgggtcgtaatactcagggcgtgattctgatccgtaccgcggaagatgaaaatgttgtcggcctgcagcgcgtggctgaaccggttgacgacgaagaactggatgccatcgacggcagcgtagcggaaggcgatgatgatatcgcgccggaaaacgatgctgacgacgacatcgccgaagacgaagagtaatcgtcgcaggtaaatgttctgaaagggtcgggtattatcccgaccctttttgcattaacattgcggcaaagcccatttaccgctactttaaccccattctgttgagcccctgacgaccgagcattgccccattgaaatatcttgcctcgtttcatacgaccttaaaggtttctcgttatcttttcagagcgctggcggttctgctatggatgctaattgcctttgtctccgtgttttatatcgttaacgcattgcatgaacgtgaatcggaaattcgtcaggagctgaatcttaacgccgaccaggcgcagcgctacattcagcggactgcggatgtcattaaagagctgaagtacgtcgcaggcaaccgcgcggcgaccgggagcgagggtagcgcgttacttgccaatagcggcaatatcacaatccctaattttgaaccgctgtatccggattccgactgcagcgcaatgagcggcgcctggcgcaattcgctgcaatcgctggcgtggttcatgcgctactggcgcgataatttctccgccgcctacgacctgaaccgtatctttttaattggcagcgacaacctttgcatggctaattttggcctgcgcgatatgccgctggagcgcgatcaggcgctgaaggtgctgcatcagcgtatcgaacaatatcgcgatgcgccgcaaaacgagcgcggcaataatttgttctggattagccagggcgtgcgtccaggcgtcggttatttctatgctctgacgccaatctacatggctaaccgcctgcaggcgatgctcggcgtcgagcagactatccgcatggagagcttctttacgccaggtagtctgccgatgagtgtgacgatcctcgatgataacggccagcagctcatctcccttgccgggcctgataacagcattaaaccggaaacccgctggatgcaggagcggatgtggtttggctacagctctggtttccgtgaactggtgctcaaaaagagcctgctgccgtcatcgctgagcattgtctattcggtttccgtcgatcaggttctggagcgtatcagaatgctgatccttaacgctattgtgctgaatatcctgaccggcgctatcttgttcgcgctggcgcgtatgtatgaacggcggatctttataccggcggaaaacgacgcccaacgactggaagaacacgagcagttcaaccgtaaaatcgttgcctctgcacccgtcgggatctgtattttacgcacgcatgacggcaccaatatactgagtaacgaactggcgcataactatttgaatatgctgactcacgaagaccgacagcggctcacgcagattatttgcggccagcaggtcaacttcgtcgacgtgttaaccagcaacaacaccaatctgcagattagctttgtacactcgcgctatcgtaatgaaaacgtcgcgatttgcgtgctggttgacgtttccgcccgtgtgaaaatggaagagtcgctgcaggagatggctcaggcggcggagcaggccagccagtcgaaatcgatgttcctcgccaccgttagccacgagctgcgtacgccgctgtacggtatcattggcaatctcgacctgctgcagaccaaagcgttgccgaagggcgtcgatcgcctggtgacggcgatgaataactcctccagcctgcttttgaagattatcagcgacattctcgatttctcgaagattgagtctgagcagctcaaaatcgagccacgagagttttcgccgcgcgaggtgatgaatcatatttcggcgaactatctgccgctggtggtgcgcaagcagcttgggttgtactgcttcatcgagccggatgtcccgcagacaatgatcggcgacccgatgcgactgcagcaggttatttccaacttgctgagtaacgctattaaatttaccgataccggttgtatcgtgctgcatgtacagcgtgccggcgactatctgcaaattagcgtacgtgataccggcgaagggatcccggcgaaagaggttgtgcgcctgttcgacccattcttccaggtcggtaccggggtgcagcgtaatttccagggtaccggtttggggctggctatttgtgaaaaactcatcagcatgatggatggcgacattgccgtggaaactgaacccggcatggggagtcgtttcaccattcgtattccgttatacggcatgcagcagatgccggcgctgttggccgatcgacacagcaacagcacctgttggctggcgattcataacacgtcactggcgttgtttatcgaatcgttgctgcaatatcatggtctgacggttcgacaatttgatggccaggcgccagccgccgacgatattttattaaccgatgatgaactcagcgatcgttggccgggaagcgctgcggtgatcttctgccgtcggcatatcggcatccccgttgagcgcgcgccgggagagtggttgcatagcgtcaccacgccgcatgagctcctgccgttgctgggccgcctgctgcatctggcgctggcggtggaagagaacggtccggcgctgtccgcccatgacgcgccaacggtcagcaatgatgacatgatgattctggtggtcgacgatcacccgattaaccgccgcctgttggccgatcagcttggctcactgggttaccaatgcgtgacggccaacgatggcattgatgcgctcaacgtcctgagtaaacagcatatcgatattgttctcagcgacgtgaacatgcctaacatggatggctaccgtctgacgcagcggatccggcaactggaaatgacgctaccggtcattggcgtgacggctaacgcgctggcggaggaaaagcagcgctgtctggagtcgggaatggatagctgtctgtcaaaaccggtgacgctggatatcctcaagcacacgctggccacttacgccgcacaggtacgcaagaccagaaatgcaagctgaagccgcactttatcgtgttgagatctcccggagcgtgatgctttccggggtggggaataatgcttcataatggcccggaaacggcggctggccgccatccgggaaatgtgaattactctttatccgtcgaggtgagagaaacggaagagaggtagttcagcagtgcgatatcattttcaacacccagcttcatcattgccgatttcttctggctactgatggtcttgatgctgcggttcagctttttggcgatttcggtgaccaggaagccttcagcgaacaaacgcagaacttcactctcttttggcgacaggcgtttgtcgccataaccgccggcgctaattttctccagcaggcgggagacgctttccggggtaaactttttgcctttctgcagcgcggccagcgctttcggcagatcggtcggcgcgccctgtttgagcacgatcccttcaatgtcgagatccagtaccgcgctcaggatcgccgggttattgttcatcgtcagaacaatgatcgacagctccgggaaatggcgtttgatgtatttgatcagggtgatcccatcgccatatttgtcgccaggcatcgacaagtcggtaatcaaaacgtgcgcgtcaagcttaggaaggttgttaatcagggctgtggaatcttcaaattcgccaacaacattcacccactcgatctgctcaagtgatttgcgaatgccgaacagtacgatcggatggtcatcggcaataattacgttcatattgttcatgtattaggctaccttgctacagcaagctcttgacgtaaccgtcaatgtcgctgatgtatttttctataccttgagcatctcgttcatgaatcagatgctcaagcgcttcacataactgcttgccgggtatcaaattaagcatagcaaacgcgccttttaggcggtgagcggtctgcgccagcgcagcgaaatcgctggtggtgaattcagtatacaatctctgaacatcatccggtaccgtgtcagcaaacagcgcgtaatagccgctggcatggagttccgcattcccctcgtttcctgttgaggagggctgaacctcttcttgcgccagctgctgctcaatcagctgcaggatagcttcctgcatggcagtgctgatattaaaattgacgctcaactggcctgggccaattttgcgtatcccaacctcatcatcgcttaaaagcaagcctgaagcagtaagattagacggattatcagttaaaaagagatcatactcttgacttgtgagcctttcgtccggggtgatgcagcttgccccccaactctctaactgacgcgtcacgatgcggcgcacttcattggcggtaacgtcaatcatcacgaccacatcgtccagcaggtgttcgccagagtcgctctcttcctcgcttgccgccattttaaggtgtagcgagtagcgcgtaccgagcgattcccgcgccttaatattgagctgtccgccaagcttgcgagttaaccgatcgcatagccagaaggtgagggcattggccttgccgtactggtcggcttgcgtctcattaaggaacgggaagtgcatattatcgatttcattagcgctcacgccattgccggtatcaaggatacggaaggtcagacgatcatcggccgattcatctttactcacctcgagggtaattttaccaatagaggtggtggtaatcgcgtattgaatcagcagtaatagcgtgcggcgcagcgcgtcgcggtcgccgtagcgctgctcgttggccggcagcgcattattgattaacagctgaagccctttgcgtttcaccattggcaggacttcaggaaccacttcatctattaaaccctgaatggagaacaaaccggatgtggttttccaggcgtcgctttccagtaagttcgccaactgaatctcatcgaccagatgaactagttcatcagcgtgctgcgccagttttcggctttcatgaatgccaattgccgccgcttcctgcgccagcgtctgcgcggggtctttgagcgcggcgccaatgttctgcataaaagcgatgcgcccctgctggtttttttcatacagccgctgggcttgtttaagctttttattcaccagtacttctctatcctgatcgcgaataatcaggatctgcgtacgcggcgctacctggctgcggtactggcggatttcataaagttcattattaatcgtcgcctgaataaccccttgatgctgatcggccatattggtgatgttctgcaggttgagatgaggcagcagatgatcggcaattgggttactaataatggtgcggttggcttcctgatcgtggaccaacagacccaacggtagcaaagaaactatctcttcattaattgcgcgctgagcgcgcaattcgctattcgctgcagcggggggcgcgctaacgttgccagaggtacggcggccgctatagttgcggaaagtggtaaagccaaacagggttaacgccagcaggccaatggtaagcagcagcggcagtaaaatattctgtaaggattccattagcatagtgctgaatggcacgacccacaccagccgcatgccggtggtattgatagcggtggttatctcaatacgcaggccattaaagctgatgctgacgttatcaacggcttctttgtctggattgctagcggcattttgtgccggatctggctccagacggaaactgtccagcgacatgctgggagggatgagatcgttaatcggtaagtcgaaagcgactactgttgccaaatgacccggctggttaaaggtggtgcgtagtgtgaagtagtggccattttgccacgtcagatggcgcaacgaagaaaaggtttccctttcgtccagcgtatttgcctgcagcagcatttcggcacggcgggattccaccacgctgctaatcgtcgattctttaaaactcgaggacagatctttcagcggcagggtagagaccagaatcaggctgttatcaagcccattcaggtaatacatcgaccagggaatggtttccgcgccccataaaatatcgaggtagttagaaatcttctgcgtcatctcaagcgtcgagctgtcatgagatccgaaaatcaacgcctcggttttgcgtcgaggtttttccagatagtagacgtcctgcttcagccgcgtctcttgcaggccatcgctagaggtacttgagctggtggcggcgatattgtcataaatctgccaggtggcgtaacgccaggtatcaatgcgcttgtgcaaagcatggctaatatcaaccacctggtaacttctgtcttttagccaggtattgaccgaactttggatcatcacgcccatcgtcgcgagcaagacgataaccatcaaaatgaagaaccgggtgatgctgccggggatcagggagaattttttttgggtcatcgcgtggcagagctgctcagtaatgtttgtaaacaggatgttgcgccatattgacgggcagcacaacgaatactggcaggaagtataaaggctaacgcggtaaatccatacaatagattgacgttgagggatcttttaatgctgagattactctcaaaaccatagatgcgacgaatatgtacagttgaattgatcttgtacaattaaccgggatttgttgcagataaatagcacgaaaaaacaagaaattggcgaaataggctgacttttattcggaattgattgattaatagtcgttatttttttctgcgttagcacagcataattaaagatacgtaaagaagggtaaaaaaaaccggatgcgaggcatccggttgaaataggggtaaacagacattcagaactgaatgacggtaataaataaagttaatgatgatagcgatgattattttagtcttcggggaagattttgttttaccattcagtgctatacattttcttgcttttaattctatgattttaaatataaatattatttttttgatttttggtgcttattttggcgacctttatcctgcgtaaaaagttcctttgaatttacaaattgaaacatcttgtgcgcattttgaaacaccttagaagttttcgtatcatattcttgttggattattctgcattttgcagcacaatgaatacagccgactgattagaagggtaatcagtaagcagtggcaataataaaaggcatataacaaacagagggttaataacatgaaagttaaagtactgtccctcctggtaccagcactgctggtagcgggcgcagcaaatgcggctgaaatttataacaaagacggcaacaaattagacctgtacggtaaaattgatggtctgcactacttctctgacgacaagagcgtagacggcgaccagacctacatgcgtatcggcgtgaaaggcgaaacccagatcaacgaccaactgaccggttacggccagtgggaatacaacgttcaggcgaacaacactgaaagttccagcgatcaatcctggactcgtctggccttcgcgggtctgaaattcggcgacgcgggttctttcgactacggtcgtaactacggcgttgtttacgacgtgacttcctggaccgacgttctgccggaattcggcggcgacacctacggttccgacaacttcctgcagtcccgcgctaacggcgttgccacctaccgtaactctgacttcttcggtctggttgacggcctgaactttgctctgcagtaccagggtaaaaacggcagcgtgagcggcgaaggtacttctccgaccaacaacggccgtggcgctctgaaacagaacggcgacggtttcggtacctctctgacctatgatatctgggacggcatcagcgcaggtttcgcgtactctcactctaaacgtactggcgaccagaattcccaactggctctgggccgtggtgacgatgctgaaacctacaccggtggtctgaaatacgacgctaacaacatctacctggcgactcagtacacccagacctacaacgcaactcgcgcaggttccctgggctttgctaacaaagcgcagaacttcgaagtcgttgctcagtaccagttcgacttcggtctgcgtccgtccgtcgcttacctgcagtccaaaggtaaggatctggagcgcggttacggtgaccaggatatcctgaaatacgttgacctgggcgcgacctactacttcaacaaaaacatgtccacctacgttgattacaaaatcaacctgctggacgaaaacaacttcactcgtaacgccggtatctctaccgacgacgttgttgctctgggcctggtttaccagttctaagcaacctgaagtgttgaaaaaggcgcctgcgggcgcctttttttatgcccggtttaacctcactggtatactctggctgcctttgtaacaggagcccgttttcatggataccacctttttccgcgccgcctttatcggcctctgcgttctgcttaccggctgtgattccgcgacatccccggccacgccaaaatccgccgccaccgtgctcgatggcaaaacgatggggacctattggcgcgtcagcgtcgtcgggttggatccggcgaaagccgaagatttacgccataaagttcaggcgcagctcgacggcgacgatctgctgctttcgacctggaaaaacgactccgcgctgatgcgcttcaatcatgccgccaccaccgaaccgtggccggtgagcgaagcgatggcggatatcgtcactctgtcgctgcgtattggcgccaaaaccgccggagcgatggatgttaccgtcgggccgctggtcaatctatggggatttggcccggataagcagccggtaaaaacgccgacggagcagcaaatcgcggcggcaaaagcgcgtaccgggctgcagcatctgacggtgattaaccgcgccgatcaacagtatctgcaaaaagatattgcggatttatttgtcgatctttccaccgtcggcgagggctatgccgccgatcatctggcgcgcctgatggagcaggaaggaattgcccgctatctggtatcggttggcggcgcgctggtcagccgcgggatgaacggcgacgataaaccgtggcgggtagcgattcaaaaaccgaccgaccgtgaaaacgccgtccaggcgatagtcgatatcaacggccacggcatcagcacctccggcagctatcgcaactactacgagctggacggcaaacgtatttctcacgttatcgatccgcaaaccggccaccccatcaatcataagctggtttcggtgacggtgattgcgccgacggcgctggaagccgacggctgggataccgggctgatggtgttagggccggaaaaagcgcaacaggtggcacacgagcagggactggcggtgtatatgattgtgaaagagggcgacggctttaagacctggatgtcgccgcagttccgcaccttcctggtcggcgagcagaattaaaaagcaagaagcgcagttttttagatcggagcaaggcgcaaagtaaggatacacttacagcaggagcccgctatgaaaccgatgattgccgatatgactaacgatgaccgccgctggcaggcggtctgcgaacgtgacgccagcgccgacgggcagtttgttttcgccgtgttgaccactggcgtctgctgccgtccctcgtgccgttcacggcgtgcgctacgggagaatgtccgcttttatgctgatgtcgaagccgcaaaggccgccggatatcgcccctgtaaacggtgtcggccggataatctcgacccggaccaacagcgggtcgagaaggtggccgccgcctgccgtctgctggagcaagaggcgccaatcacccttgaggcgctggcgcagcagctggcggtcagcccgtttcatttccatcgcatttttaaatccgtcaccgggctcacgccaagggcctggcagcaggcctggcgcgcgcggcgcctacgcgaagcgttaagccacggcgagaatgtcaccagcgcggcattagccgccggcttccccgattctgccagcttttatcgccaggcaaacgagacgctgggcatgaccgcccgccagtttaaacgcggtggcgaagatgtggcgattagctgggtttgcagcgatagcacctctggccggtgcctggtggcgttcagcgaacgtggcgtatgcgccgtattgctgggcgatgacgataaggcgttatatgcgcagctgacgagcttgtttccgggcgcccaattacagcctggtgatgacatgtttgccgaacgcgtggcgcaggtggttgcccatttggataatccgcagcaggcggttaatctgccgctggatattcgcggtaccgctttccagcagcgggtctggcaagccttacgccagatcccggcaggcgaaacccgtagctaccgcgaggtggcgcacagcatcggtcaaccgcgcgcggtcagagcggtagccggggcctgcgctgccaataagctggcgatagtcattccttgccatcgggtagtgcgtgagggtggggcgctttccggctatcgttggggcagcgaacgtaaagcgctgctgctggcgcgcgaagcgaaaatacgggagaaataatgctcgatttgtttgcagatacgccaccctggcaggagccgctggctcccggagcgatgatattacggcgctttgccgtgcagcgtgcgccgacgctgctgcaggccatcgccggggtggccagcgcttctccgttccgccagatggtgaccccaggtggttataccatgtcggtggccatgaccaactgcggccaactcggctggacaaccgatatgcacggctatctctatgcgccgggcgatccgttgaccggcgaacattggccgccgatgccattggtttttcaacaactggcggcggaggcggcgcaggaggcgggctatgcgcatttttccccggacgcctgtttgattaaccgctaccagccgggcgcgaagctgtcgctgcatcaggataaagacgagcgggatttgcgtgcgcctatcgtttcggtgtcgctgggactgccggcggtgtttcagtttggcgggctgaaacgtaacgatccgctgcgccggctgttgcttgaacatggcgatgtggtggtgtggggcggcgaatcacggctcttctatcacggcattcagccgcttaaaccgggggagcatccgctgaccggcgcctgtcgctacaacctcacttttcgcctcgcgggtcaccggcaaaaacaaaaataagaattattcttgctgtcgtcggcaagccgtttaaactgctggctgtttgcttgtccggatcgtagcttatggaattacttgttcttgtttggcgccagtaccgctggccgttcattgccgtcatggcgctcagtttgctcagcgcggcgctgggtatcgggcttatcgcctttattaacttgcgcctgatttcccttgtggatacctcgctcaccgtgctgccggagtttctcggcctgctgctgctgttgatggcggtcacgctcggctcgcagctggcgttaaccacgcttggccaccactttgtctatcgcctgcgcggcgaatttattaaacgcattctcgacacccaaatcgaaaagatcgaaaaaatcggcagcgcttcgctgctggcgggcttaactagtgacgtgcgtaacattaccatcgcctttgtgcgcctgccggagctagtgcaaggcattatcctgaccttcgggtccgccgcctacctggcgtttctgtccggaaaaatgatgctggtgaccgcggtctggatggcggtcaccatctggggcggctttgtgctggtggcgcgcgtctataagcatatggcgacgctgcgcgagaccgaagataggctgtatcatgattatcagacggtgctggaagggcgcaaagagctgacgctgaaccgcgaacgcgccgaatatgtttttaatcagctgtatctgccggatgcccgcgactatcgccaccacatcatccgcgccgataccttccacctgagtgcggtgaactggtcgaatatcatgatgcttggcgccatcggtctggtgttctggatggcgaatggcctcgggtgggccaataccgcggtggcggcgacctattctctgacgctgttattcctgcgcacgccgctgctgtcggcggtgggggcgctgccgaccttgctcagcgctcaggtggcattcaataaactgcatcagttcgcgctggcgccttatcgcgccggtttccccgagctgcaggcgcatccgcactggcagaccctggagctgcgcgacgtgtcgttccactacccggataacagttttgccgtcgggccgattaatttgactctcaaacgcggcgaattggtgtttctgattggcggcaatggcagcggcaagtcgacgctggcgatgttgctgaccgggctgtatcaaccgatctccgggcagatcctacttgatggtcagccgctggcggcggaaaaaccagaagattaccgcaagctgttctcggcggtatttaccgatgtctggctatttgatcgtctgttagggccaaaaggcgaacacgccgatccggcgctggtcgcgaagtggctggcgtatctgaagatggaccacaagctgcagctggaagagggaaaaattctcgatctgaagctgtctaaaggacagaaaaagcgcgtggcgctgctgctggcgctggccgaagagcgcgatatcattttgctcgatgagtgggctgcggatcaggatccgcatttccgccgcgagttttatcaggtgttattaccgttgatgcagcaaatggggaaaaccgtgtttgctatcagccacgatgatcactatttccagcatgccgatcgcctgctggagatgcgcagcggcaagcttagcgagctcaccggcgttgagcgcgaactggcgacccgcgatgcggtcgcgcgtactgcctgacggttttgctgataacccgagcgggcgtgctcgcccgttcgggccatattgctgttttttacggcagataaattgctggcggttattatttcccctcctcgcgctatgcttatggctgcggccatgcaggtcgacttctattctcacaaggattgcccgagcgatgtccgttttgcataaaaaaagcgcccgattacgcgatgaagaacgcgcccgcctgatttggctattaagcactgataaagccgtcacctccgcgctgctggggaaactcaccctcgcggagcgctatgatgaagggacgctggccgatgacctggcggaagtggaagtgctggtgtcgcatttgccgccgccggatctcgccgatgccctggaagcgttgccttatgacgcgcgtaccgcgctgtgggggctggttgctgatgacaagcgtggcgaagtactgctggaggcgtcagagagcgtatggggcgatctcatcgataagatgagcgatcacgacctgatatttgccctgcaatcgctggatattgatgaacaggtttacctgttgcagcacctgccgcgcgacttaacaggccgtctgctggcgacgctgccgccggataagcgcgcgcgcattcgtcagatgatgcgctacgccgataacaccgtcggcgcgatcatggagtttgaggtgattaccgttcgcccggaagccactttggcggcggtacagcgctatctgcgccgtctgggcaaaatgccggaaaacaccgataaactgttcgtcaccacccgtaataaactgctgcttggcgagctggagctgcagactattctgctcaatgatgcgcaaaagcgcgttggcgaagtgatggaaggcgatccggtgactttccagccgcaggaagaggcggaaaaagtggcgcgtaccttcgaacgtgacgacttactcagcgcggcggtgattgatgccgacggcaagctgatgggacgtttgaccatcgatgaaatcgtcgatgtggtgtacgaagagaccgataatgatctgcgccggatgggcggtctgagcgaagatgatgatgtttttgcgccggtgagcaaagcggtgaaaacccgctgggcatggctggcggtgaacctctgtacggcgtttatcgcttcacgggtgatcgacggctttgaacataccatctcgcagctggtcgccctggcctcgctgatgccgatcgtcgccgggattggcgggaataccggcaatcagacgatcaccatgatcgtccgtgcgatggcgctgcagcagatccagccgggaagttttaccttcctgatcctacgcgagatgggcgtcgcgctgattaatggcctggtatggggcgggataatgggcgctatcacctggtggctgtacgatgacccgcagcttggcggggtgatgacgttggcgatgatgctcaacctgctgatggcggcgatgatgggggttatcatcccgatggtgatggtcaagctggggcgcgatccggcggtcggctccagcgtgatgatcaccgcgattaccgataccggcggcttctttattttccttggtctggcgacgctgtttctgatgtaagctgcgattttacgcgcaggcggcgagggatgagcgccatcgcgataagccccgccagcacgccgatcgccagattactggtggcgaccgtcacgatgacggttgccgccataaccaccgtttccggccacggattgcgcgccagcgcggttgggcgaatactctgccaactgaaggttttcaccgctacaatcaccatgaccccggccagcaccgccattgggattttggccattacctggctcagcaccgtcaccagaagcagcagtaccagaccggccactatcgtcgataggcggctacgcgccttgcccatttccacgttaacgatagtttggccgatcatcgcgcatccggcgatgccgccatagcagcccgcgaggatattggcgatccccagtcctgcgctctcacgcgacttatttgacggcgtatgggtgagatcgtccaccagctttgccgtcagcagcgattccatcaggccgacaaaggcgatactcagggcgcagggccagataatttttaaggtgtttaaatccagcggcaccgccagcgcgttgaagcccggcagaccgccgcccatagcgccttcatcacccacggtcggcaggagttgcccgctggtgacggtataagcagtaagaaggacgatagcaataagcggcgccggcacggctttgataaaacgcggcgcccacagcacgatgagcagcgtcagaacgaacaggccgacgatgagcggctgcctgctccagaaatggggaacctgggcaaaaaaaataagaatgcctagcgcattaacaaacccggtcatcaccggtggcgggataaagcgcattaaccgcgctataccgcatatcccaaacaaaatttgaataataccagccagaatgacagcaggcagaatataccctacgccatgctgatgtaccatcgggccaatcaccagggcgacagaacctgccgccgccgttaccatcgccgggcgtccgccaagaaccgacatcgccagacagagcaccaccgaagcaatcaggctgacctgcgggtcaacgccggcaataaccgaaaatgaaatgacttcaggaattaacgccagggcagtcagcacgccagcaagggtctcgcgtgttatcaacgccggagagagagagcggaaagttgagggcataaaagttcgcggatgataaaaaatttgaattgagacaagccgctgttggcgtgcgctccatcacagaacgggagatgatagcgcggaaagcaccatcataccagtacaaaaagtgattttgtgtacacatttattaaacatttttataacagatctcaaaactcaacttaaaatttaaacaatatttaaatttttgagtacaggtggtacctttgatcccgagaatcgtttcacctgcgctaaataaaaaaagcgagtaaaagtaaggctcaaatccgatgaagaaaaagatggccgtacccagctcacaggcggttggttccaatacaaatcggaccaacacccgccatgagcaagagacggatgtattgttgattggcggcggtatcatgagcgccacgttgggaacctggctgcaggaactggagccggattggtctattaccatggtcgagcagatgaccagcgttgctgaggaaagctcgaacggctggaacaatgcgggtaccggccatgcggcgctgatggagctcaactacacgccgcaaaccgccaatgggatcaatatcgacaaagcggtcgatatcaatgagtccttccatatttctcgtcaattttgggcccaccaggtgacccgcggcatcctgactaagccgaaatcttttattaacagcgtgccgcacatgagctttgtgtggggtgaagacaacgttaacttcctgcgcgcgcgctacgcggcgctgcagcagagcgagctgttccgcggtattcgctattctgaagatcatcagcagatcaaggagtgggcgccgctggtgatggaagggcgcgatccgcagcaaaaagtggcggcgacgcgtactgaaatgggcaccgacgttaactacggcgagatcactcgccagctgatcgccgggctacagacgcatgataacttctctctccagttgggtaccgtcgttcgccgctttaagcgcaatgcggacaacagctggacggtgacgctggcggatgccaacaatcgtcaccagaagcggacaatcaaaaccaaattcatctttattggcgcgggcggcgctgctctgacgctgctgcaggaaaccggtattccgcaggcgaaagagtatgcgggcttcccggttggcggacagttcctggtgtgtgagaacccggaagtggttaatcatcacctggcgaaagtctacggtcaggcggaggttggcgcgccgccgatgtcggtgccgcatatcgacacccgtattatcgacggcaaacgcgtggtgctgttcgggccattcgcgaccttctcaacccgcttcctgaaaaacggctcactttgggatctgctggcctcgacgaatacctcgaatattctgccgatgcttaacgtcgggatggataacttcgacctggtgaaatatctgattagccaggtattgcagaaagataaagatcgtcatgccgcgctgtgcgaatactacccggaagcgcgcaaagaagactggcgcctgtggcaggccggtcagcgcgtacagattatcaaacgtgataagaagatgggcggcgtgttgcgccttggcaccgaagtggtgtgcgatgatgaaggcaccgtagccgcgctgctgggcgcttctcctggcgcgtcgacggcggcgccgatcatggtgcagctgttggagaaagtcttcaaagacaaggtacagacgccggcctggcaggcgaagatgaaagagatcgtgccgagctacggcatgcgtctggatggtaacccggccgctattgagcaggccctggcgtggaccagtgaagtgctggggctacactatgagccgacgactgcggcagacgaagtgccgcaggctgaactcaagccgctgaccggcggcaaaccgatggcggatatcgcgctataacaaaaacggcagccctcgggctgccgttttgtattaccgctggcgattaacgctcaacggcattaccgatagtttcttcagctttccagatgcggtatttcacttctacgttggctggagtataaaccacgatcggcagcttgctgttgtaacgcagcaggcctgtatcaccgagacccgcggtaacaaatttcttctctttcttgccgtccgggcaggccatcatggtggaaaccggggacgtcagcttatcaaagacatagtagtcataaccccagccttccagggttttgctttccagttgaccgcccaggcggtgatggttgcagtcgacttccagcgtctggccaatcatcagttcaacttttaacgcggattcatcctgctgctgcggcagctgaatcacctgacgcttcatccctttttccgctttcggatagggggcgactttctccagcggctgctcagcggctaacgcgctggtggaaacacaggcaacggccagcagagaaacagcaagcgtagcgatttttttcacggttgatcatcctttattatcgttactaaccaatacagactaacatcattcccctgaatggtaagagttatttaccattattttcaatatgaatagtgaaatgcactagtaaagtgaggcgtgcgtcagctattcatcgcggctgtttttagcttcttcaataaactcttcgtccagtaagtcggcgttcccggcgtgttcacggcccgataacaggttccagcaggcaataaacaaggcggcaatcagcgggccgatgacaaagccgttgatgccatagatttccatgccgccaagggtggcaatcaggatcagataatccggcattttggtatctttccccaccagtagcggacgcagaatgttatccaccaggccgatgacaatgacgaagaaaccgacaataaacgccccttgccacaattgcccggtggcgaacaggtaaatcgccgccggcacccagataatggcggagcccaccgccgggatgagtgacagaaaagccattaaagcgccccacagaatgctgccatcaagaccgacaatccagaatgcaaagccgccgagcgccccctgtgccagcgcgacggcaacggtacctttaaccgtcgcccgcgcaacggcggcgaatttggcaaacaggtgctgttttacgtaattggatagcggcaaagattcgagaattaacagcaccagataagggccatctttcagcaagaagaacagcagatataacataatgccgaagctgacggtaaagccaaaggtccctttaccgatcaggaaggcgctaccggccagatactgtccacccttcagggcggcatcggatagttgctgctgaatctgttccgcgctatcgagattgtgctcggagaggaaacttctggcccagctcgggagatgggcaaacaggttggcgaccaccgtcggaaactgggtgtcattatgctgtagcttggtgtagaccacgttcagctcgaaggccagcgacgaaatgataatcgccaacggggtaaaaacaataagacagataatgacgacggtcagaagcgccgcgataccgttgcgttcaccgatgcgcgtacggatgttattttttaccggattaaatatcaccgccaggatagcggcccacagaatagcggaatagtaaggagagagtacgtcaaaaaaggccagggtaacgatcagtaaaataaggataaaaaatcctttggtaagtcctttaactctcattgggtccgctccagatgataacgaatacagtcgaataatagatggaatttaacaatttgccatcaggataatcgcagtcataaagggaagggagtacaaacattaaaaagatgtgctacaagacgacatgatcatgtgtggcgatccgtccgtgcaatttaaatcatacattttttcgtcaggtgataggcttgggtttatctaactatttgaggtatggccgaaagtgaatatttccgagatctacgagtggcgcaagaatagctacctggtcagtacagacagagaaaaactggatgttaaggctatccatcggtatctgacaaggtcgacctgggccaagggtatcaatcttgacactgtcgctacatcaattgaaaacagccttaattttggcatttatcatcatgatactcagataggcttcgctcgcctgattacggattttgcaacatttgcctatctttgtgatgtgtatgtgctcgaagaatatcagggagaagggcttggaaggtggatgatggaatgtttgcataatcatcctttatttgaacagcttcgcagaattatgttattcaccaccaccgcgccctggctttacgaaaagttcggctaccagccagtaaaccaggaaaactacgcctggactattaccaggcctgatatttataccaagggataaaatctgtctgacaaacactcatattcaggtgcttgttggcttgtttcctgatgtatctactcttgacgcgaagctggcgtgcaggaaatcaccatacccagtggcgatatcccactcacgattccaattcagcaatcgccagttcggcaatttttattgttattgaagccgtttcgttacttgagagtgaccaggcggttgaaagaccgcaccacgcaattatccatttgagcaggcgctctttatccatgtctgccatcctggtaacgatgcttagacgctgtttaaaggtctctggtacagtcgcaacagcaggtaccggataaccaagatccggattagtaaaaatattagcaaagtcgaatccacgttcacctatcagccctttggggtcaatggctaaccaaccggacgtttcaaaatcaagcacgttaccgtgatgtaagtcgccatgtaatacaaccatatctcgtggagaagaaagcaactcttctgaaatttctgcgcaacgtgtcaggataccgccatactgcaaggcggctggttttagaggataaaaccattcacgcagggaggttagccgggggaacggtcttttggcgaatgaatgaagccggttcgcagtcatacataaaatacgacaagctatatcatccctatctccacgagacattgctgataaagacgcggaaccagtggctcttgagagaagaattgcttccttttcatgtgcaatcacatgggcagcgccgttcccttcccaccataccatgagtgcattaccggtttgttcgtcagtatcatcagtgacttttaacatggctttaataccatgggttgctgttttgaccggatacaactgtgacgtatgagtgacaaatggggtgccatcaggaatgagattccagcaatttagccagggtgttaacttgaacatatccataaagcggtctttaacatccttgcaatcaacgtttagacaacgtccgtttcgggtaaatcaatgataaccagtataccaaagctgcccgtatctaccgtatgaggaatgccagcttttgccacataaagctggccagacgatacagtgattttttctcccttcacactcagctccagttgtccattaatgaccagcaacccctcgtcatactcatgtacttcttcagccactgagcgttcatccattcgtacaactttaagatttgcagtgccaatgcggcctaatacatgagagtgccaggcttcaggtaatgcatgcgcttcggttctgaggtcataaagcgacataacgtcattccttttgatgtgcgtttattgctcttatgccatataagtttcctgccgtcatataacaaatatgagaaaacaagttgagtaagaagtgtatatttactgagttgaatttcctctgtgagcgaggggcggatgtcctgcttcatcatgatgggcagggggagttacagccggcggttacgcggtgaatgaactatagagaaaggccgggcagggaaacacgttccaggtctggagtgaaggaaggatcgagtttttcgacggggtttcaccccctgcgaaaaacaggcacaaaaaaaccagccataataggctggtttttcgaaggtttttggtcggcacgagaggatttgaacctccgaccccgacaccccatgacggtgcgctaccaggctgcgctacgtgccgacgcgtggaggataatattacccgttcccccatcgaatgcaagcgaccgacaactgattgattcaaaattaatcaatcagttagcgatgaagcgtttttcatccgtcagcacctgcagcagcaggctgagctgcggtttttggtctttcaccttctcaccatcgctgttccaggtgtgataggtgccgttgtggtcgagaaccacggtcatcgttggcgtggtaatcgccagagtatcgctattagcggcggtgacccaactgcggcggcgcgccgggctaaacaggtcttcgccctgcgaatattcattcgctggcgtcgacacgtgcagcagacgctgcatcagcgtcgtcatcacgtctttgttatccgtgagcgttgagatctcttgtgctggggttcccggccagtggataaccagcggtacctgcagattgccccgcgaccagtcgaattgaccctgcttgctatccagaggcataccgtgcccggcggtaattatcaccaccgtattatccagtttgcccgctttacgcagcgcgtccagcacgcggccaatttgtgtatcgacgtcgcccgcggcgcggccgtaggtgcgcgcaaaattctgctgctgcgtactatcaatatttgtgccgttcagcgatacccacgagaaccagcggttctcatcctgggcgtagcgatccagccagccgatccattggtcggctgtttgttcatcgctctgcgttttggctgctggcagagagaagtctgacagcagcgcctggcgataaagcgggctgctgaaaccgtctgacgagaacagacccaactggtagccctgttggttgagggcggtaatcagcgccgccgggatacgcgccgagagtacgccatccatatagcccggcgatatgccgtagaacaggccgaacatcccactgtcggtactattgccggagctcatatgctggctaaagttgacgctctctttcgcaaaagcagccagctgcggcatgttcttctcgaagcgtgaatagttaaggttatccaccgtaatgagcagcacgttgtaacccgtaccgaggtcgcgatagcgcagatcgctcagcggatattgcaccgaaaccgcttccggcgcgccttgctcaaccagacgacgctgatagtcttgcgcatcgagcaggccatgcttctcaaggaagcggcgggcggtcatcggataagaaagcggcaagttggcccgctgcatggtgatcgggcgataaaaattggcatccgcccagatataaatcaggtggctgctgataaacgaaataaagaaaaaccaggcgacggggcgcgcgtagtggcggcggcgcgtcaggctccgcagcttttgccagctccaggtggcgaagagcatctcaatcaggaagatgatcggcacgctgataaacatcagttgccagtcgcgagccatctcgttctggtcgggattaatcaccagttcccagacgacgggatttaagtgcaggtggaagcgagtgaagacttcgctatcgatcagcagcagcgtcatcccgcggtggcgaagatgaccgataggaagcgcataagccgctgcgagccgacgataaaggtcagcgggaagagaatcagtacatagctggtgaaaaccagaaaactgaaatgaccaacgaggctgacatacgagaatacccgcccggcaagcgtcgttggccagtcggcgacaaaaagatagcggctgccgagcgccattgccaacaacatgttgaacagggcgaaccagtgtccccaactgaccatctgggagactttttctcggtagggctgacgaagagtcaccatatactgttgttcgttatccttagtgcgcgggatcgtcgttaatggacgattgcagcgcctgggcgaaagaacgggcgattgcctgacgctgcgccggcgcgacgctactgttgatcaggttggtcaccatattgcccagcaccatcagtgacaggtcaaccggcgctttgtgtgtttccaggacgttcgttagctcgctgagcagctgctcgacctgttcatcgctatagcgggatatttgtggcataaactcaaaatctgtttgttcgtgaaagggcaacatattaccgtagcagcagctttttttccgcattttttcgccacggcgcaaaagcgcccagcaaggcgagtctcaagcgtaaaagaggcatctgccggttgcgtcgtcgtcccggtggtggttgaataccgcccggtctaaaaggagagtttaacatgagtctggatatcgaccagattgccctgcatcagttgatcaaacgtgatgaacagaatctggaactggtgctgcgcgagtcgctgctggaaccaaatgccactgtcgtggaaatgatggccgaactgcatcgtgtctacagcgcaaaaagcaaagcctacggtctctttaatgaagagagcgagctggcgcaagcgttgcgtttacagcgtcagggtgaagaagaatttcttcctttcagccgtgcggcaaccggccgcctgcgcgatgagctggcgaagtatccgtttgccgaaggcggcatcgtgttgttctgtcagtatcgttacctggcggtcgaatacctgctggtggcggtgctcaataatctgagcagcatgcgcgttaacgaagagctggatatcagttccacgcattatctggacatcaaccatgccgacatcgtggcgcgtatcgatctgaccgagtgggaaaccaatcccgaatcgacccgttacctgaccttcttgaaagggcgggtggggcgtaaagtcgctgatttcttcatggacttcctcggggccagcgaagggctcaatgccaaagcgcagaaccgcggtctgctgcaggcggtagatgatttcgccgccgacgcgcagctggataaatccgagcgccagaacgtgcgccagcaggtgtacgcctactgtagcgaacagctgcaggcgggcgaagagatcgagctggagtcgctgtccaaagagctttccggcgtcagcgaaaagagtttccaggagtttaccgctgagcagggttatgagctggaagagagcttcccggctgaccgcagcacgctgcgccagctgactaaatttgccggtagcggcggcggcttgaccatcaactttgacgcgatgctgctaggcgagcgcgtattctgggatccggcaacggatacgttgaccattaaaggtacgccgccgaacctacgcgatcagctgcaacgccgtacttctggcggtaattaacgctctcctggctaacccggtgaagcataatgctgccgggttaaccttctacctgaataatcccgacgccgctttgcttaagcttctgacgtaacctgtcatccagtttgctgtcgataaccactgtactggcaagattaagctcgccgatggcaaacgcggaggcactattaattttttcggcagatgccatcaccacggtttctgcggctctggccgccagcgcgcgcttaatgcccgcctcttcataatcaccggtggtaaagcccgcctgcgggtgcacgccggtaaccccataaagaacagatcggcattaatccgcgccatcgccgccagcgtctcggccccgaccgtgacaaccgaatgtttaaacattgtgccgccaagcaggatcacgtcgatccgaggatgctcgaccagcgccacggcgatccctggactgtgcgtcaccacggtacaagcaaggtcggcgggtagcgcggcgatcatcgccgtggtggtggtgccgccgtcgacgatgaccacctgtcctggctggataagcgccgccgcccggcgggctattgcctgtttggaagccatctgcacgctttttctgctttcgattggcgcgatagcggccgataccggcagcgcgccgccgtggacccgttgcagcttgccttccgccgccagttcccgcagatcgcgacgaatggagtcttctgagacctgaaagcgctggcttaactcccccgacatcacctgtttttctgcggcaaggatctgcaggatgtgctgttttctctggctggcgagcatgttgttcacttcacgattgatcttgtttatgcacgattatgcatgttatgttgcccgctgtcaccttagaaggggaaaaacatgcacgcagacgcaccgcgcgttcgccacgttcgcgaaacgctcttgtccgataactggtacacgctgaaaaaatataccttcgagctgttgcgccgggatgggcgctggcaggagcagagccgggaagcctacgaccgcggcaacggcgtggttattctgctctataaccgccacaagcggagcgtggtgctcatccgccagtttcgttttccggtgtggatcaacggtcacgacggctttctgatcgaagctgccgcggggttactggataacgcctcgccggaagaacgcattatcgccgaggcagaagaggagaccggttttcgagtcacccgcatcgagccggtattcaccgcgtttatgagcccgggatcggttaccgagaagctgtacttctttattgccgaatactccgcggacgatcgccgtggcgatggcggcgggctggcggcggaaggagaggatattgaagtgctggagtggccactgtcgcgggcgttacaggccattcgcgatggcgaaatcgtggatgcaaaaaccattatgctgctgcagcacctggcgttaaatgccgatacgctccttgccggttaagcggcaaggagccggcaagattagcgcaattcgcgggcaatggcgctgtacatcagcgccgcttccagcggctgtgcgttaaaggatggttccgcctgcggccaggttgaccactgcacgatcaccagatgttccgcacggttgaccataatcacctggccgtagatccccagcgcccacagcgagcctttcagcccttcctgcggcgttggctgtacgttttgcgcattggccggaatagcgttattccaccattgatagccgtagataccttccggatgcgctgctgaaaccgagttcagcgcttttgtccagcttgcggcttgatcgaaccagccagcgggcaccagttgtttaccgttgctcaggcggccatcgcgggcgacaaactcgccaaagcgcccccagtcttcgagcgtggcgttaaagccgtgggcgccgacatcatgttgtccttttttgtaggcgtgccagacgccatcgtgggccattcccgctggctgccatagtgattgttcaagccaggcggccagcgacataccggtagcgcgctccagcacatcgcccagcagccaggcgccgccggaagagtaggaccactgctcgcccgccgggtgtttgcgcgacagcgtcgacacaattttacgcacgcaatcataggcgccgggttgcgcttcacactgggtcaggcgggcgaagtgcgactgtggattggtgtaatcttcattccattccacgccgctggtatgttgaatgagctgcttgagcgttacaccgtcccaggcggtgcctttcagttcgggttcataaacggtaatcaggtcatcaagggagtggattttaccctgttgaatggcgataccgaccagcgttgagacgaccgatttgcctaccgatcgcgaggtccacagcgtggtgtcggtattaccttcggcgagatatttccaggcgactttaccatctttcagcaccagcataccgctgacgttttcgcgcttcaggtaatcctgcaaattccaggtgtggccgttgagcgtgtagcgggcatcggtcagttgctttttagcgcgctccagcgggaccgagtcgccgtgacggaaaacatcgccagcatagttgcgatagtcattacgaaagccaatcacgcgtgaagtctgatcccaggtgagcatgtctttggccgcaggtagcgtttgatcgtaaggcgtggggcagacatccagcgtcaggccgccgcagttttgcgccattgccgccgccggcagcgccgccaaaattaacgccagggccagtggttttcttatcattttcatttcctcgtttgccatagattcgcatcgcagtatataaatcggcgcgcggcggctaaaatcactacatgggggattttcccccgaaagggagggaaggatgaaaaccctgcagtattcatttgcacagattgaagccttcgcgacgattgctgagaccggtagtctgtcgcgggcggcgatccgtttagggaaagaccgtacgacgcttcgcgatcttctggattacctggaggatgcgttgggctaccggctattcagccgtgaagggcgtagtctgactttaaccgccgagggcgagcagctttttcgccaggcgcacctgttgttgcgtcaggcgcaggctttcgagtcttttgcgcaaacgctgccgcaaacggcctggcaggagttacgcctggtctacgatcccttcgtgccgcgtgagtttctctgtttgctggccgatacgcttgcccggcggcagatccgtttaagctgctggagcgcttcgcgtcgcgaggccgagcaggcgttgagcgatggcgtcgcggatatggccatttgccaggctaacaatcgtacgctgggtagcgaaatggagtggcgggcgctgggtaccgttgatttacgcttttacgccgcgcagcggttgttcgctgataccgcaaggccgctgacgttgctgaatttatcgctaaccccgcagttagtgatgcaccggcgcagcgacgatcaaatcgcccgccggttgcagatatccgggcatacgctgtatatgaatgaaatcaccatgttgcgccacgcaatggagcaggggctggggtggggttttttacccgaccatttacagcccggcgagtggcaggggtagctgaaattgctaccgaggtcggtaatcaggggcttaacgttaccatggtgatgctgtggctgccgggaatgaataaacaccgcgcgctgggagagattgttgacgacgcgccagggttatggcggcgcagataacaaaacgccccgggtcagaagacaccagggcgtttgccatacaacttgctatcggcgattaagcgcgaacgaagtcgatgtgggtcagtttcggcttgaacgcgtgacgctgaacagcctgaactttaactttctcttctttgccatcgacaaccagggtcagaacttcgccgtagaactcagctttgtcctgcatgttccacagtttgtcgtggtccagttcgatagcaaccggagcagcttcgccaccgtagatgattgccgggaacttgttagctgcgcgcaggcggcggctcgcacccttaccctgctctttacgtacttctgcgttgatagtaaacattgatgtctctctatatataaagcctgcaacaggcgacccagcagcaggcagattatctgctttgcgaatgcaaaagcgggcggcattatagccgcctatcggcacagcggcaatcaaaacctcagtttttgacggattaacgtagctcattggcgcgacggaaacggccctgataatcgaacactttttcccgcacctgccagtattgcccttcatccgggcgacgacaaagtctggatggcgcagtagcgcctgctgggcaatgatatccgccggggttatccagcgcagcggcacgcccggcgtacgggtatgtgggcggataaataactgctcaaaggcggtacgttgcgcgggcgtttgtaaacggaagcgctcactcacatcggcgccatcttcatcgtaataggtgattttcagccacgggcctttttcgtcgctgccatgcagcagcgccatcccgctgcagcgcaacaccagcgcgtctttaagcttcagcgccgccttcagcatgtcgtccgggtcgaccagaacagtatcgcactcgcgacagcggcgggcggcaatgtcattctcggcgttgcactgcgggcagtttttaaaacgaaagcgaaagtcgcactgttcgcggtggccgtcgtcgtcttcgaaccagccctggcagcggcggccaaaatgctcaatcaacgtgccgtcggcggtggttttaccccaaaaagtattggcgaaaccgcaggccgggcagaagacctgcaccgggacattatcgcttttgccttttggcgtgccgacttccggcgcgtacaggtcgtgggggttgccggcatagtcgaggatcagacagtcggttttgcccggcgccagacgcaggccgcggccaacaatttgttggtaaaggcttaccgactcggttggccgaagaatcgcgataagatcgacatgcggcgcgtcaaagccggtggtcagtaccgcgacgttcaccagatagcgatactgctgcgccttaaaggcttcgatgatgcgatcgcgctccggccccggcgtttcgccggtaatcagcgccgcctgcgcgggcggcagcaggccggtaatttcccgcgcgtgttcgacggtcgcggcgaagatcatcacgcctttacggctttcggcaaactcaacgatttggctgacgatatgcggcgtgatgcgctgctgttttttcagctcgtgattaagatcggcttcgctgaacaggccattgctctgcgcctgcaggcggctgaaatcgtactgtaccaccggcatatcgaggcgctcaggcggcgtcaggtagccgtgcttaatcatataacgcagcggcagttcatagatgcagtcgcgaaacagcgctttctcgtcgccgcgtaccataccgtgatagtggaactgatagatccacccttgccgagacggaagggggtcgcggtcaggccaagtagcctgagctgtggattcacctgccgcagatggctgatgatctgctgatactggctgtcgtcatcgtcgctgatacggtggcactcatcgacgatcagtaaggagaattcgctctgaaactgctcaagattgcgcgccaccgactgcacgctgccaaagaccactttgccctggctctctttacgctgcagaccggcggcgaaaatatctgcttccaggccaagcgcacagtatttactgtgattctgcgccaccagttctttaacgtgggccagaaccaatacgcgtccgcgcgccagccgcgccagttcggcgatcaccaggcttttgccggcgccggtcggcagcacgatggcggcgggttcatggtgacggcggaaccaggcgagcgtggcgtcaacggcctctttttggtagggacgtagtgtaaaagtcatcaattctcgggggttaattaactcgcaaatagtatgccatgaatcttttcccttgagtggtgttaagagcccgttatactaaccaatggaattcttctttttcgggcgagatgcccgctccagcattattacaggctaaaaaatctcatgcgacttgataagtttatcgctcagcagcttggcgtcagccgtgctattgccgggcgtgaaatccgcggcagccgcgttaccgtggacggcgacattgtgaaagatgcctcctttaagctccagccggagcatgaggtggaatatgatggcaatacgctgacccagcagcacggcccccgttattttatgctcaacaagccgcagggttatgtctgttcaacagacgatcccgatcatccaacggtgctttattttctcgatgagccggttgcccataagctgcatgccgccgggcgtctggatatcgacaccaccggtctggtactgatgaccgatgacggtcagtggtcgcaccgcatcacttcgccgcgtcatcactgcgaaaaaacctatctggtggagctggaaaatccgctggaagagggcgtcgccgagcagtttgccaaaggcgtgcagctgcataatgaaaaagatctcaccaaacctgctgtcctcgaagtcatcactcctacagaagtgcgcctgaccatcagtgaaggccgctaccaccaggtaaaacgcatgttcgcggcggtgggtaaccacgtcgtgggattacatcgcgagcgtattggcgagattaccctcgatgcgtcgctggagcccggcgaataccgcccgctgacggaagacgaaatcgccagcgttggcgccccacaagcacggagtaaaacgtgacgacaaagcagaattcttcatttgggattgtgtttattcttggcctgttggccatgttaatgccgctgtcgattgatatgtatctgccggcgctgccggtcatctcgtcgcagttcaacgtgccggacggcagcgcgcaaatgacgctcagtacctatattctgggctttgcgctggggcagttgctgtacgggccgatggccgacagcattggccgtaaaccggtgatcctcggcgggacgctgatattcgccgcggcggcggtggcctgtgcgttgtcgcagaccatcgagatgctgattactatgcgtttcttccacggcctggcagccgcggcggccagcgtggtgatcaacgccctgatgcgcgatatctacccgaaagaagagttctcgcgcatgatgtcgtttgtcatgctggtcaccaccattgcgccgctggtggcgccgatggtcggtggcgcggtactggtgtggttcagctggcacgcgattttctggatcctggcgttggcggcgctgctggcatcggcgatgatcgctttctttattagcgagacgctgccggtagaacggcggcagaaatttcatattcgcaccacgcttggcaacttcgccactttgttccgccacaagcgggtgctcagctatatgcttgccagcggctttagtttcgccggcatgttttcatttctcagcgcgggtccatttgtctacatcaacattaatcacgtgtcgccgcagcactttggctactattttgcgttgaatatcgtgttcctgttcatcatgaccatcattaacagccgcttcgttcgccgggtcggcgcattgaacatgttcagagccgggttgtggatacagctggcgatggcggtatggatggtagtgtgcgcgctgcttgatgttggtttctggtcgctggtggtgggcgtggcggcgttcgtcggctgcgtatcaatggtctcctctaacgccatggcggtgatactcgacgagtttccgcatatggcgggaaccgcatcgtcgttggccggaacatttcgctttgggattggcgcgattatcggcgcgttgctgtcgatggccacctttaccaccgcctggccgatgctgatttctatcgcattttgcgccgttagctccattctcttctatctgtacgccagccggcgacgaaaagtcgcacattaagtcacattttcaggggcgatttccgccccttttttgatacatatcaaccgaaatcggcttccctgtttagctatatgtttcttttatgtaaaatcaattagtgtaaaaagtcgcaatattgcgataaaaaagttgttttggatcacagaaacgggtacatatagccgcgaactgtttccgcaaggcaactataaagttctggataataagctgttagccctggcccgatgcgggtgtaagcgttttctaagctgttgcaggactatttgtcaacaatgtgttaatattgatgtaaatttattgtgaagccttttgcttccggggaaaccaagtgaatacacagcaactctctatcgtacaccgactgccgcagagctatcgctggctggccggttttgcgggttcaagagttgaaccgattccgcaaaacggcgcgcagagcgaaaatagcctggtggcattaaaactgctcagcccggacggcgagaaagcgtggccggtgatgcgcacgctgagccaggcgctgagcgacatcgaagtggactgttccattcttgagtgtgaaggcgaaccgtgcctgttcgttaatatgcaggatgagtttgccgccacctgtcgtctgaaaaatttcggcgttgccattgccgagcctttctctggcaataaccccttctgaccgtcagcttaacgccaacagctggcgggtgtactcctgaagcggtgccgtaaatacgcgctcgcattctccctgctcgacgacttctccctgccgcagcactatcacctgatgacagagcgtccgcacaacatgtaaatcgtggctgataaacagataggccagctgatgcttttgctgtagcgtcttcagcagcgccaggatctgcgcctgcacggttttatccagcgatgaggtcggttcatctaacacaatcagctgcggtttgacgatcagcgcccgggcaatggcaatacgctggcgctgaccgccggagaattctgccggatagcgctgtcgcgtcgcgggatcgagccccacttcctgcatcacctgaatcaccgcttgttcacgttccgcgggcgtcagcgtcggctgatgaacgcgtaatccttcctcgataatctgcaggacgctcaggcgtgggttgagcgaagaattcggatcctgaaagaccacctgaatgcgtcggcgcagcggcagcatctggcggcgatttcgtccctggatcgactcgccggcaaactgcatttctccgctggagttaatcagccgcagcagcgccagcccggtagtgcttttgcctgagccggattctcccaccagccccagcgtttctccggcccgcagggtaaaagtcagatggttgaccactcgattgtgatcgaccacccggcgcaggatccctttgcggattgggaaggcgacattaagatcgcgggcctgcagtaggatgggcgcgtcggcggggagcggcaccggtttgccggccggttcgctatccagcaggcggcgggtatacgggtgcgttggcgcctgaaacagctcccggcagccgttttgttcgacgcagcggccgttttgcatcaccgccacccggtcggcaagctggcggacgatgctcagattgtgggtgatgaacaacatccccatgttgagctcacgcttcagttcgcgcagcagttgcagaatctgcgcctgtaccgagacgtccagcgcggtggtcggttcatcggcaatgagcagctctgggcgcgtcagcagcgccatggcgatcatcacccgttggcgttcgccgccggaaagctggtgcggatagtcggcaagccgtcgtgaggcgttgcggatgccaacccgatccagacagtcgaggatttcgccgcgcgccgcctctttgcgcatgccgcggtgcagcgaaagcacctcgtacagttgtttctccagattatgcagcggattgagcgacaccatcggctcctggaaaatcatcgcgatgcggttgccgcggatcccgcgcagggttcgttcatcggcgtgcagcaatgattgaccgtgaaagcgaatatcgccgctgggatagctgaccggcggcgagggcaggaggcgtagtaccgacagcgcggagacgcttttaccggagcctgattcgcctaccaatgccagcgtttcacctgcggcaatccgcagcgtcaggttgttgactaccgtctggcttgctccctgctggcgaaaggcgatagagaggtcgtcaatgtctaataacggctggcccatgttataccgccttacccggatcgaaggcgtcgcggaccgcttcgccaatgaaaatcagcagcgtcagcagcaccgccaccgacaaaaatgccgccatccccagccacggcgcctgcaggttatttttcccctgcagtagcagttcgcccagcgatggcgagcctagcggcaggccaaagccgagaaagtcgagcgaggtcagggtggttatcgaactgcacaaaataaacggcaggaaggtgagagtggcgaccatcgcattcggtagcatatggcgcaggattatatggcgatcgctgaccccagcgcctgtgcggcgcgaatataatcgtagttacgggtgcgcaggaactcggcgcgaaccaccccgaccagcgtcatccagccaaataaaacggtaatcgccagcagccaccagaaatcaggttgcaccacgcttgagagcagaataattaaaaatagcgtcggcatgccggaccatacttcgataaaacgctgccccacaggtcgagcttaccgccgtagtagccctgcagcgccccggcaagcacgccaagcacgctggagaagagcgtcagcagtaggccgaataataatgagatccgcgcgccatagaggattcgtgcgaatacatcgccgccgttagcgtcggtacccagccagttgtgccgggacggcggcgaagggaaggggctgtcggtggcgaaattgatgctggtggcgccgaaacgcaccggggcccacagcacccagccgttttccgccagccgtttttgcagccagggatcctgatagtcggcggcggtggcaaaatcaccgccaaaggttgtttcgctataggttttcagcgccggtacgtagagactaccgcggtactgcaccagcagtggtttatcgttagcaataagctcggcgcacaggctgcaaataaatagcgccaggaagatccatagcgaccagtagccgcggcgattgtggcgaaaacgcgcccagcgggcctgattaacgggagagagaaatggcattagcggccctcgaaatcgatacgcggatcgaccagcgtatagctgatgtcgctgacaatgtttaataacaggccgattaacgtgaagatatacagagtgccgaacatcaccgggtaatcgcgcgacacggtggcttcgtaaccgagcagcccaagaccattgagcgagaacatcacctcgatcagtagcgaaccggtaaagaacatgctgataaaggtggcgggaaaaccggcaatcaccagcagcatggcgttgcggaaaacgtgtttccacaggatctgcttttcactaacgcctttggcgcgggccgtcactacatattgcttgcggatctcatcaaggaaactgtttttagttagcatggtcagggcggcaaaaccgccgatcaccgtcgccagcaccggtaaggtgatatgccagagatagtcggcgatcttctggtaccacggcaggctatcaaaattagcggagaccaggccgcgcagcggaaaaagatcgaaatagctgccaccggcgaagatcacgatcagtaatatcgcgaacagaaacgccgggatggcgtaaccgatgatgataaatgtgctgctccagacgtcgaaatggctgccgttactgacggctttacggatccccagcggtatcgacaccaggtagataataagcgtgctccacaggccgagggtaatagacaccggcaggctgcctttaatcaactgcagcaccgaagcgctgcgaaacaggctatcgccaaaatcaaaacgcagatagtcgccaagcatcttaagatagcgttcgtgaatcggtttatcgaagccgtagcggtgggtgatttcggcaatcacttccggatcgagcccgcgcccgccgcgataatggccttcactgatattgccaacgccggtacgcgcatgactggcgcccataccgctatctcctgcgccgggcaacccgccgcggtcgccgaactccacggcggcgatcgcctgatcgaccggaccgcctggcgcaatctgcacgataaaaaaattgatggtgatgatggcccagagcgtcgggatcaccagtaatagtcggcggagcaggtaggcgcccatctttaatccttaacgtcggtccgcaggaagcctggcggctttgttaacatcgtaccaccagccatcaaaaccggaggagtaggtcgggcgtgtttgcgggaaggaaaatttattccagtaagccgtccggtcctgcgccatataccacatcggcagcatgtaatagttccaggtcagcacccggtcgagcgcgcggcccagcggcagaagcttatgtttgttcccctgccagcgaacgatctgcgcaatcaacgcgtcgaccgccgggttctgcactcccggcgcgttatagctggagttaatatagtccgagccccacgaaacctgtaaacccgtatctggccaggcggtggcgcgccacagtgagggcatcatgtcgtaatcgcggctgcgcagtcggctgttggcctgggagttatccacctgacggatatccatcgtcacgcctaaacgctgtaaattatgctggaacggtagtacccaactgacgttgccgccagaggcgagcagcagctcaaagcgcagcggtttaccggttttggcattaacgcgctgacggttttttagcacccatcccgcctggttcaatagggcatctgctttgagtaaattagcgcggtcaaaaccatcgccgctggagactggcggctgataaatccgggtaaagacctcaggcggcaaatcttttttcagcggcgccagcagggcgagttcatcggccttcgggtaatcacgagcggcatattcggtattctgaaagtagctgtttggccgactgtaggcgccgtaaaacagcgccttattcatccattcgaaatcaaatgcaagggtgatagcctctcgtacctgacggtcggcaaagaccgggcgttgaatattaaaagccagccagcgggtatcctttgccgaggtagtcgtacgatcgtctttcacaatataaccgttgctaaagttgcgcccgatatagcgtgtagcccagttttttgttgaactctcctcgcgcagatctaccgctcccgccttgaaggcttcgaaagcgacgttatcgtcaagatagtagtcgtagcgaatcgtgtcgaagttccagcgcccgcggtttaccggcaggtcggcgccccagtagttttcgactcgcgaatagacaatatactgccccatccgccagcggctgatgcgataggggccgctggcgagcggcggtgttgaaagcgggtcactcagtttatgatggcgccagaatgactcaggcattaccggcagcgacagcaggctgagcatattttctttgcccggcttggccagttcgatgcgcaccgtcagcggggcgatggctttgacggtcgtccctttatagataagacggaactgcggtaccccttcggtcataaatttgtggaaggtgaaagccacgtcgctggcggtaatcgggctaccgtcatgaaagcgggcgcgcgggttgatggtaatttccatccacgagaaatcatcggcatagcgcgcgcgatcggctatcagcgggtagtagctgcccggttcatcgtccgaggtggtaaacagggtgtcatatagcgcatcggtgcgtacgccgggattaccgcgcagggcgtagcggttgaaattgtcaaaggtgccaatggcggcaagcgtaatactgccgcctttgggcgcgtccggattgacgtaatcgaagtgatgaaagtcaacggcatacttcggctcgccgataatagcgaacgcttcgctctctttaatggtttgcgcctggctacaaaggctaaataaagtcagtagcagcaggccgatgcgcgcaaacatagttggaatatcatcctctgaccattaaccccggtggtttcgcatcataagcgaccctcagcggcttgtgaaataatttgccggttcatcatgggcggcgaccagtttatccagcggcagcgggcggctgaagcagtaaccttgcagatacttcacgccgtgagcgcgcagccattccgcctgctcaggcgtttctacaccttcagccacggttttcaactgcagacggcggcttagcgttagcaccgcatccaggacgggagaagtgacggtttcggtaccgatcgcctgcacaaaaccacgatcgatcttcagataatcaaagttatagcgctccagataaatcagcgcgctatggccggtaccaaaatcatcgatagcaatttcgaagccctgctgatggagccactcaaaaatggccaacgactggtttttatcgatcatcgagcgttcggttatctccagcacgacgtcgaagtagtttgcgggcaacgcggcggcaaaacgttgcatatcttgctgaaatccggcggcatgcaggtgggcaggcgagatattcagaccgagcttggtaccgcgcggcaaaatacgctgcagagtcggcgcgtcgcgggcaatcaacattaacaggtgatgggtaagcggcacgatcatctgctgcgtctccgccagattaataaagacgtctggcgggatttcacctaccaccggatgccgccagcgcatcagcacttcaacgccgctaatctgcagggtatcggcctttaccactggctggtagaccacgtagaactggttgtttttgatccccagttggatcgatttccgcggatcggatttgatcgtcaggatgtagtagctgagcaagccggcaagcatgccgcataccacgccgagcaacagggcgaactgggtattctcgccgagccaactgttagaaaagagatacacttttagcggtagccccggaacctgaatctggcgtatcggctcattgggcaatgatagcgggtcgataattttgctgctgaaggtcgaaattgccgtatggccgatggccagcgcaatgccgctgaaatcattctgtcgtgcggtatagaggatataaggcgtcagattggcattgatggatacaaaaatgccgctgtctcgatcgccaggacgttgtacccacatggccagcgcggcggtgttcggcatcatcggcgtgccctggaggatggccatatccagaggtttattggtatcaagctgcggtatcaattgtttaaacggtgtgtccattgcgccggtggcggatgagcagaacgctttgccgtttttcaccagcaggaaggcgcgcacgttgggactaaaggcggcgctggcggcgaggccggagtcaatatgttcgcagggctgatcgagcaggggctgcaggccatcgatggttttgcttaaatcggcgaaatagctatcaaggtagtggctgacgttattgattatctgatcgaaacgctcagagcggttgtggtagataaccataaactggatgctgccggccagcagagcgacagcaacgccaatgcaaatactggtaagccagattttacgtcggggtgaaaagtagcgggttagcataggccagaatctgtccgtattattgaatcacgccaatgggatgcctgaagagtatggttccatttcctttaaaaggcatagcttgtaatgacatagcttattttgcggagttcatcggcggaaaagcaaaaaaaaacactgccggggcagtgttcttttcatttcttaccgtcagccaagggataactcacggtaagaagaagaatcaggaacgactcagaacgcgacgcgcttcgttataacgctttttccagtatggctcatccaggcttgagatggtgacgccgctgctggtagaggcatgaacaaactggttgttgccgatatagataccaacatgacgacccgtagagcccgcgcggaacagcactaaatcaccggtacgcagttgagtgcgcgaaatcgatttgccggaatcctgttgctcggaagttgagcgtggcagctccaggccaaattgttcacggaaagtacgctgcacgaatgccgagcaatcgatccctttccgggtgctgccgccaaggcggtaacgcacgcctttccagctagcatattggtccatcaagcgggacttcacgtccaggttgctgaccattttttcaaattcatcctgagaggcttgcagtgatgataaatctccactacccacagcatgcgtctcagaatgcatattcttggcggtacttgttgaactacacgcggaaagcagaaccgcaactgcaatcgcggggcgacccgcaagatatatctcaaaatcggctgagatttgaccattatgtttattttcccttgttgtccttaacgactatgtcgttataaaaaatgccaaacgtggtagagcctagattccataaagcaatgagacaattccttaagcctaaaaatgtggagtgccgcacatttttattcagatgatgaattgtgttgcttgggaaggcaaaacgagaaagagattaccctatcaaacgtgggatggcgagcggttttgcgagatttcttataagtatttttgcgacaaaaagtgaatcatcggcaaagggaaaaatagggccttttttggctgaaaaatatgcaatatcttcatttcaatgatgattaatgtgacaggaagatgatgtcgcgaataaatcatcagcaatataaaaaaggggtcagaacgaccccttatggataatattaataaaatgtaaaaatgatcttaattttttgctattccacccggaagcgaacggtcaaaccaggcaatggccttatcggaaagcgaggtcattaatacccatggcgcgccaatcaacaccgcactgagtgaacctacggcaatatcggtgaaccaatgagcgccgatcattactcgcgggaaagcaaaaaccacaaaaataaccagtgaaatgataaatgcccggcggccgaaatatcgccacataaacgaggcgaaaatgagcagcatcataccgtggtctcccgggaagctatcttttgaagcgtctttggtgggcagtgaaaccacgtcgctgactttagtaatatccgtaaagaacagcgaaggactagcgcgttttaccggcatcagatgctgggcaagttgattgataatcaccgcagcgagcaacatcaccagccccataatgataatacggcggcgttcagcgctctgcgcgttgagccagaaactaagcatcagacagcccatcgccagcagcgagcaggcgtcgaaagcgcgattgttgatgatcgctaacagccaggcatacgcgtggttggcgctgacgccctggttaaagaagtgaaaaatagctgagtcaagcgggaaccagaaaccgtgatttgccggtagataccaggaacaaaataaggctacgcccgcgacgttcagcagcaagataaggggaatacggtttttagtcataacagatgcgatttttttaaacagcggctaaaaatagccgcattaacttaaacgaagcttcaacagcgaggactgcagggcattccagtcaacgtctgattcacaaatcagttcgatgcggctatccggcggcggcgcattttgcgtttcgatatgcagatcgagtccctgacggttgatacgcaccaatccttcagcaatacgcatcacgcctttcacccggccaaccggcgccagacgcgcccactccagcaacccaacggtgtcaaattgggtatcagcatcaaaaatccagccgcaggcatggtatccctggccgctgttaacactgcgacgccagcgttgatgcgccggtagatttaacgccgacagaccctgcttttgtccgtgactatgcacgtggtccgggcttgccggcagcggggcggtgttacggcgcggcagatccagcagcgcgagctcgatatttccctgggtggcgttcacctgcaggcgctcgccgccgtactgttgccaccagttggtaaaagcagcctcgctttcaggcgtcgcccgatcgcttttattggcgacgatgacatcggctgcggccagctgatcgcggaaattatcattggctacgatcttctcctccaacagctggcgcggatcgagaatgcacagcgtcgcacgcagatcgatccacggctcgtagaccgcagcggtgaggatatcaaggatctgtttgggatgacccaatccggttggttcaattaacagccgatccggctttccctggcgcagcagcgtattaagcccaacctgcatcggcaggccgttgacgcagcacatacagccgccggggatctcttttagcaacgcgccgctctccgccaacagggcgccgtcaatgccgacttcgccgaactcgttgaccagcacggcccatttttcatttgctggcttgtgagccagtaaatgaagaatcgaggtcgttttgccgctgccgagaaagcccgtgatcaggttagttttggtcacatcccctccagcaagaaatgtaatgttgtaacagttgcgactatcctgacgaaaaaaggggaaaaagagaaggattactgcggacagaaaaacattctgtccgctaaacagcagaaattgttaattatgcagtgcggtagctacggcttcgcgggcgcctgatttagctaactgatgccaggctgaagtgatttcggcaacaaattgtgggttgcccggcagatctttgccgaatatctcttccaggccaagcagggcgctgacgcgttcctcttgctggctggcgtcaaccaaccgtttgattttgtcgactagcgggtcgcgcacgtcaatggtccgcccggcgtcgtcgacgccgcttacgtaacgcatccagcccgccacgcccagcgccagcagtggccagcggctgtcgtttgccagatgaacgcgtatactatcgagcatgcgctgcggcagcttttgactgccgtccatggcgatttgccaggttcgatgctttaaggccggattggcgaagcgcgttatcaggctgtcggcataggcaactaaatccacgccggtaatcgatagcgttggcgcttgttcatcaagcatcaggcgacgggcggcatggcggaaaacatcgtcctgcatgcagtcgctaacgtgcgcatgccccgccaggtagcccagccaggcgaggaaggagtggctaccgttgagcatgcgcagtttcatttgttcccacggcaggacatcgttggtcatctgtacgcccgcggtttcccaggctggacgcccggcgacaaaattatcttccaccacccattgaataaacggttcgcagctgatagcgcagggatcgtcaacgcccagcacggaggcaatctccgccaaagattcttcggtggcggctggcacgatgcggtcaaccatggtgccgggaaagctgacatgttcagcaatccagttggccagctcctgactacgtttctcagccatgccgaggacggcgtttttcacgacgtggccattgtcgggaatattgtcgcaggagagtacggtaaaaggggcgagtccgcgttcgcggcggcgattgagcgcttcaactaaaataccgggagccgactgaggcagcgttgggttttccagatcgtgaacgatacgcggctgggttgggtccagtttaccggtcgccggatcgatgcagtagcctttctcagtgatcgtcagcgaaacgatagccacctgcggttcgcaaaatttttcgataatcgctgccagcgaatcaagtctggcgttcaggcattcatgtactgcgccaaccacgatcggctggttaccctcagcgcctttttccagcaccgtaaacaggtggtcctgcgcacgcagttggctcatcagcttatcgccgctgaacaggctgatttcacaaattccccagtcgccgccgctggcgttaagcacccggtcggttagcagcgcctgatgcgcacggtgaaacgcgccaaaaccaaaatgtacgatacgcgagcgcaattggcggcgatcgtactgcggaagttgtacgcctgacggcagcgcggcggtagcgatagttgtcatttttatacacctgattaaccaatgattaacatgaggcagtgtaaagttatatgacagcaatttaaattggtaagccgaatttatccgcttagtgtgagctggatcaatcaatgctacgggcgaaattgaccattcagcagaagcatgtatggtagtcgtcatgatgtttcatattattggtataacaacttaaagagggcattgcgatggagcaaacctggcgttggtatggaccgaacgatccggtatcgcttgatgatgtgcgccaggcgggcgccacgggtgtcgtgacggcgttgcatcatattccgaatggccaggtctggccggtagacgagattcaacagcgtttagcgctactggcggaaaaaggcctgagctggtcggtggtcgaaagtatcccggtgcatgaggatatcaaaacccacagcgggcaatatgataagtggattgccaactaccagcagagcatccgcaatctggcggcctgtggtattgataccgtgtgctataacttcatgccgattctggactggacgcgtaccgatctggaatatcagctggccgatggctccaaagcgctgcgttttgaccagattgctttcgccgcttttgaactgcacatccttaaacgcccgggcgccgaggctgattacagcgctgaagaacagcagcaggctgacgtctacttcaaagcgatgagcgcggcggatatcgataagctgacccgcaatatcattgctggtctgccgggtgcggaagagggttatactctcgatcaattccgtgcgcggctggcggagtatgaccacattgataaagcgcaactgcgtgagaacatggcttacttcctgcgggcgatagtgccggtgtgcgaagaggtaggcgtgcgcctggcggttcacccggacgatccgccgcgtccgatcctcggcctgccgcgtatcgtgtcgacgatcgatgatatgcagtggttgaaagagacggtggatagcatttataacggctttaccatgtgtaccggatcctacggcgtgcgtgccgataacgatctggtgaaaatggtggaaaccttcggcgatcgaattcactttacccatttgcgttctacctgccgtgaagagaatcctaaaaccttccatgaggcggcgcacctgaacggcgacgtcaacatggtagcggtggtcaatgcgatcctgagcgaagagctgcgtcgtaagaaagccggcgatctgcgtcccatcccgttccgtccggatcatggacatcaaatgcttgacgatctgcgtaagaaaaccaaccccggttattcggcgattggtcgcctgaaaggcatggcggaagtgcgcggcgttgagctggcgctgaagatgaccaaatacccggaactgctgtaaggtcgagtaagacgcggagcatcccatccgggaacagacccggcctgcgctatgcggggccgggcaaccatcagaggcgggaggttagtccgcgcggcccatatagcggcactcttcgatatgaatgcggattttctcgccgctggtcaggtattccggaacctgaatcaccagcccggtgctcatggtggccggtttggtgcgcgagctggcggaagcgcctttgattcccggcgcggtttctacgatttccaggtcaacggtctgcggcagctccagcgccagcagctggccatcccaggtcagaacctgcatatccggcatgccgccttcagggataaactgcagctcttcttcgatctgctctttggtgaaggtatacgggtatagtcttctttatccatgaacacgtattcgttgccatcgacgtaggagaagtcaacgaaacgacgggtcagggtaacggtatcaacgatgtcgtcgcccttaaagcgttcttctactttcaggccggtacgcacgtcggaaaaacgcattttatacagcgttgctgcgccacgggcgcttggcgactgaatatcaatatttttaacaatcagcagtttgccgttgtaattcagcaccataccttttttaatttcattcgctcttggcattgcagtaatcctgtcacttaaagggtcaaaaatatcgcgtaaaactactcgcgccgggcctttcaggcaagcggaattcgcgacttttgctatctcctggcaaatcttcgatcggcgttgctgaaaaagccgtgtcgccagcttcagctttcctgacgggcgatattttgctactgtccgcctcccactcattaaggagtcaggtatggaatgtcgcccggactgcggagcctgttgcaccgcgccgtccatctcaagccccattcccggaatgcctgacggcaagccggccaacaccccatgcgtgcagctggatgaacatctgcgctgcaagatttttgcctcgccgctgcgccctaaagtctgcgcgggtttacaaccggccgcggaaatgtgtggcagcacgcgtcagcaggcgatggcttatctcattcatctcgaagcgctaaccgcgccttaaacgtctttaattcgccacaggcagccctgagcgataattcccatcattagcgcaatccagaacaccgcgtgatagttccagatttccgcgacaacgcccgccagtgaaccggcgatgatccagccgacgcgcgtggtattggtatacagcgtggtcgccgcgcccgcctggcccggcatcagatcctgaaaatagagcatgccgataccggccaggatcccgatgtaaattgcgttcagcgcctgcatcgccagcaacagggctggggtatggacagtcagcataccgacataaaacagcaggccggcaagcgcggcaatgcgcatcagcaagcgctttccaaagcgtttcgcgtaataaccggcaatcagcatggtggggatttccagcccggcggcggtccccatcatcagcccggccagtttctccggcagatgcagttcattaatgataaacagcggcatattaatgatatagaggctgttggtgccccacattaacgtacagatgctgaacagtagcagcgcatcgcggcggttggtgcgcggcgcttcaagatgaccaccggcggttttgctctctttacgcatgctgggcaggaagaaccagaccatcagcgcgcagacgataaacgccacggcggcgctgagatacatcacggtaaaaccaaaacccatcgccagcgcgtaggcaagcggcgggccgattacccacgccagcgagacctgcgcgcgcagaatggagctgaacatcaccgcctcgcgcccggttttgtccgcgtgttcgcgggccagagcgaacatttgcgggttggctgtagagccaaaactactgagaaagacgccgacgaacagcagaacaaagtagttgcggttccaggcgaacagcacgcaggccagcacccccagcaggcagcaggcgacaatcagctgcttgcgatcgcctttacgatcggaacgcccggcaagaaactgacttaccagaatgccgatgaccgcgctgccggtaaaaaagaagccgaccattgccgggcgcacgtgcacttcgttggtcagaaacaggctcagggtcggggtctgtaaggctccggcgatccccgttagaaaggcgacgataagaaaagcggaggaggttaagtcgaacccgcggcggggaagggcggcgctactgttttgcatgctggaatatcgttggtttcaggagaggcgaagtttacgccgacacccataaaataaatagtggtatggcacaaaaaattaaaaaggcgtttcaaattatgtcgttcagcaaaatgctgaagccaatggcgcatttcaccattagcttcagcaaaaatgtgcggtatctctaaattctgttatcagccttcggagtttacttgcgcagtgcataagaaaggtacagactcattgaaacgtttcagcgtcatcagagcattatccagtcatcgggtggcgtattttttctcatgttggctgaaacgattcaattcagcggagaggagaactatgttccagttatctgttcaggatatccatcccggccagcaggccgcgaataaagaagaggcaatacgtcagattgctggcgcgctggttagcgcgggtaatgtggctgacggctacgttaacggtatgcttgcccgcgagcagcagacctccactttcctcggcaatggcatcgccatcccgcacggcaccaccgatacccgcgaccaggttctgaaaaccggtgtacaggtgtatcagtttccgcagggcgtgacctggggagaaggacaaaccgcttatgtggcgatcggtattgccgccagctccgacgagcacctcggactgctgcgtcagttgacgcacgtcctgagcgacgattcggtggctgaacagttgagaaccgttaccaccgcagaagaactgcgcgctctgctgatgggcgaaaagcaaagcgaagcgctgaagctcgacaacgaaacgttgagcctcgacgtggtcgccaacgatctgctgacgctgcaggcgctgaacgccgcgcggctgaaagaggcgggggcggtaaacgccgatttcgtcagccgcaccattaacgatgcgccgctcaacctgggccaggggatctggttgaacgactgtgcggaaggcaacctgcgcagtgcagttgccgtgagtcgcgctgccaatgcgtttaccgctgacgggcagccggtggcgctgttgatcaccgtcgcgatggccgatgagcagccgaccgcggtgcttaatcgcctgagtaatctgctcattgataaaaaagcggagcatctgctgaaagccgacgccgccacgctgctggcactgctgaccagcgacgacgccattgctgaagacgtgctgaacgccgagtttgtggtacgcaacgagcacgggctgcacgcgcgtccgggcacgatgctggttaatacgattaaacaattctccagcgacattaccgtcaccaacctcgacggttccggtaagccggccaatggtcgtagcctgatgaaggtcgtggcgctgggtgtgaaaaaaggtcaccgtctgcgttttaccgcgcagggtgaagatgcgcaacaagcgctggatgcgattggcgaagcgatcgccgcaggccttggggagggcgcataaatgagcagacgtgtagcaacaattactttaaatccggcatacgatctggtggggttcaccccggaaatcgaacgtggcgaagtgaacctggtacgtaccaccggcctgcatgcggcaggtaaaggtatcaacgtggcgaaggtgctgaaagatcttggcatcgacgtcaccgtcggcggcttcctcggtaaagataaccaggatggcttccagcagctgttcagcgagctgggcatcgccaaccgcttccaggtggtgcaggggcgtacccgtatcaacgttaagctgacggaaaaagatggcgaagtgaccgatttcaacttctccggtttcgaagtgaccccggcggactgggagcgtttcgttaatgattctctgagctggctggggcagttcgatatggtttgcgtcagcggcagcctgccgtccggcgtgagtccggaagcctttaccgactggatgacgcgcctgcgcagccagtgcccgtgcattattttcgatagcagtcgcgaagcgctggtcgccggactgaaagccgcgccgtggctggtaaaaccaaaccgccgcgagctggaaatctgggctggccgcaagctgccggagatgaaagatgtcatcgacgctgcccacgcgctgcgcgagcaaggtattgcccacgtggtgatttcgctgggcgaagagggcgcgctgtgggttaacgcctccggcgaatggattgccaaaccgccttcagtagaggtcgtcagcaccgtcggcgccggtgattcgatggtcggcggcctgatttacggcctgctgatgcgtgaatccagcgagcataccctgcgcctggcgaccgccgtcgccgccctggccgtcagccagagcaacgttggcattaccgatcgtacccagttggccgcaatgatggcgcgcgtcgacttacaaccctttaattgacagcaggagaggcataatgaaaacgctgctgattattgatgccgggcttggccaggctcgcgcctacatggcgaagaccctgctcagcgccgcggcgcagaaagcgcaccttgagctgattgataacccgaacgatgccgaactggccatcgtactggggaccgcgctgccggccgatagcgcgctgaatggtaaaaacgtctatctgggcgatatcaaccgtgctgtcgcccatccggagctgttcctgggtgaagcgaaagatcacgctaagccgtacgttgcgccagcggcggtagccgttccagccgccgcccaggggcagaaacgtattgtcgccgttaccgcttgtccgactggcgttgcccatacctttatggcggcggaagccatcgaaactgaagccaaaaaacgcggctggtgggtgaaagtagaaacccgtggctcagtggggccggtaatgccattaccccggaagaggtggagcaggcggatctggtgatcgtcgccgccgatatcgaagtcgatctggcgaagttcgctggtaaaccgatgtatcgcaccactaccggactggcgctgaagaaaaccgcgcaggaactggataaagccgttgcggaagcaaaaccgtaccagccatccggcaaaccgcaggcgtccggcgaaggtaaaaaagagtcggctggcgcttatcgtcacctgctgaccggcgtatcctacatgctgccgatggtggtagcaggcggtctgtgtatcgcgctgtcgttcgcgttcggtattaaagcgtttgaagtgaaagacaccatggcggcggcgttgatgcaaatcggcggcggttcagcctttgcgctgatggtgccggtactggctggctttatcgctttctccatcgctgaccgtccgggtctgacgcctggccttatcggcggtatgctggctgtgagcggcggttccggctttatcggcggtattatcgccggtttccttgccggttatgtggcgaagttaatcagcactaagctgaaactgccgcagagtatggaagcgttgaagccgattctgatcatcccgctgatttccagcctgattgtcggcctggcgatgatctacctgatcggcaaaccggtggcgggtatcctggcctggctgacccactggctgcaaaccatggggacggcgaacgcggtgctgcttggcgcaatccttggcggcatgatgtgtaccgacatgggcggcccggtgaacaaagcggcttatgccttcggtgttggtctgttgagtactcaaacctacgcgccgatggcggcgattatggcggccggtatggtgccaccgctggcgcttggcctggcgacgctgattgcccgcaacaagttcgacaaatcacagcgtgaaggcggtaaagcggcgctggttctgggtctgtgctttattaccgaaggggcgatcccattcgccgcacgtgacccgatgcgcgtactgccttgctgtatcgttggcggcgcggtgaccggcgctatctcaatggcggttggtgcgaaactgatggcgccgcacggcggtctgttcgtcctgctgatccctggcgccatcactccggtgctgggttatctgctggcgattattgccggtacgctggtcgcgggtctctcttacgcggtgctgaagcgcccggaagcgcctgcggcgcaagctgaaaaagcggcgtaatataagcgcaatagaaaagggccgattcatcggccctttttttgttcctgaattcaggccacttcggcggtctgctgcgcccgcagccaggcaatttcttccgcccagatatccgggttaatggtttccagaatcagcgggatcccatcgaaacggttatcctgcatgatccaacgaaaagcatcatggccgatattgccttcaccaaggctatgatgacggtcgacacggctgccaaaagcgcttttggcatcattgaggtgcatgccgcgcagatactggaagccgacgatccgttcgaattcggcaaaggtcttttcgcactcctccgcgctgcgtaggtcataaccggcggcgaaagcatggcaggtatcaatgcagacgccaacgcgggatttgtcttcaacgccgtcaatgatggcggcaagatgttcaaatttaaacccgagattgctgccctgaccggcggtattttcgataaccgcggtcacgccttcggttttcgccagcgcgatgttgatagattctgcaatccgcgctaggcattcatcttccgggatctgctgcaggtggctgcccggatggaagttgagcagcgttaatcccaactgctggcagcgggttaattcatcgataaacgcctcgcgggatttctccagggcttcttcgaccgggtgaccgagattaatcaggtagctgtcgtgcggcaggatctgccccggcccgaagtgatatttttcgcaggcggctttgaattcggcaatcgcttcgtcggtgagcggcgcggcgcgccattgacgctgatttttggtaaacagggcaaatgcggtcgcttcgatttcggcggcgcggatggcggcattggccaacccgccggaggcgctaacgtgcgctccaatgtatttcataaaaaaactccagttaagccgctgggggagggtaatgatagcggcttaaccggagagttacagcaatgaatgaatatcgacggtaaacttactgtttagccaatcaggtggtggatagcgaagttaatcgcgccgccgccaacaatcagccagacgaacagcatcagcgccatcagtagcggcttagcaccggcttttttcagcgcgctgacgtgggtggttaagcccagcgcggccattgccatcgccagcagtacggtatcgagcgtgaccagcatatcgactacggctttcggcagcaggtggaaggagttaaacaccgccaccagaataaacaggatggcaaaccacggaatggtgattttgctcttttcgccgttaccggctggcgccagctgtttcacacgagcggcgatgaacagcaggaatggagctagcatcatcacgcgcagcattttggcgataaccgcggcattttcggcgtccgggctaaccgcgtgaccggcggcaacgacctgggcgacttcatgcatggtggagcccatatagatgccataggtttccggagtgaaccagtgcgccagcagcggatacatcgccgggtagaggaagatagcgatagtaccgaagataaccactgtcgccacggcgaccgtcactttactggcttcggctttgacgaccggctcggtggccaggaccgccgcggcgccgcagatgctgctaccggcgccgataagccagctggtatgtttatcgagcccgaaaaccttctgcccgaggaaacaggcgataaagaaggtgctggacagcgtcaacacgtcaatcagaatcccgctgacgccgacgtcagcaatctgggcaaacgtcagacgaaagccatagagaataatccccaggcgcagcagatactgcttggcgaaaatcaccccgccgtcgcaggactgccaaattttgggataaacggtgttaccgaccaccatgccgaacaagatagccagcgtcagcgcgctgaagcccgcgccggcgattgcagggaaactgcctgcccatagggcggcgccggtcaaagcggcggtcagcgccaggcctgggacgaaatgccacagggtgcgatgtttagtgggtaaagtgagtgctgtcataaccttctcctttgtctgggcaaagaatacgactggctggtttaaaaataaaattgattatatatttataatctatcggaataagtgataaacccttcatccttcaggccacagccctgctgatttatgtcaccatagcgctgacggttatccagcttgggctaataaacaggtgagttatgcatatcacgctacggcaactggaagtttttgctgaggttttgaaaagcgggtcaacgactcaggcgtcgcagatgctggcgctgtcgcagtcggcggtgagcgcggcgctgactgacctggaggggcaactcggcgttcagctgtttgaccgcgtcggtaaacggctggtggttaacgagcacggccgcttgctctatccgcgcgcgctggcgctgctggagcgcgccggagagatagaacagctgtttcgcggcgataatggcgcgatccgcgtttatgccagtagcaccatcggcaactatattctgccggaaatcatcgcccgctaccgccgcgacttccccgaactgccgctggagctgagcgtcggcaacagccaggatgtgatcaatgcggtcagcgatctgcgcgtcgatattggcctgattgaagggccgtgccacgcggcggatattatcgccgagccgtggattgaagatgaactggtggtgttcgccgcccctgattcgccattcctggaaggcgaattgacgctgcaacggctggcggaagcgcagtggatcctgcgcgagcatggctctggtacgcgggaaatcgtcgactatgtgctgttgtcgcatctgcccgcgttccagttaggcatggagcttggtaactcagaggccattaaacatgcggtccgtcatgggttaggcatcagttgcttgtcacgacgggtgattgccgagcagctggaggccggaacgctggtggagctcaagctgccgctgccgcgcctgacgcgcacgttgtggcgtattcgccatcggcaaaaacacgtgtcaaaggcgctgcagcgctttatccgctactgcgaggtgtagcgctagcaacgacgtaagctacgattttttgtctgcttttttatgcgccaatgcaggattactgctttactaataatttgtgtcagatcatgaagctctcttataactttgcatttgtaccggatggacggacgatcgtctgctacaatcgcgcctcattttttggatggatagcattttcacatggtttcggaaactaaaaccacagaagcgcccacgctccgccgcgagctaaaagcgcgccacttgaccatgatcgctattggcggttccatcggtacaggtcttttcgttgcctctggcgcaacaatttctcaggcaggccccggcggcgcgctgctttcctacattctgatcggtctgatggtgtatttcctgatgaccagtctcggcgagctggcggcgtttatgccggtttcaggctccttcgccacctacggtcagaactacgtagaagaaggctttggtttcgcgctgggctggaactactggtacaactgggcagtgactatcgccgttgacctcgttgcctcgcagctggtgatgagctactggttcccggatacacccggctggatctggagcgccttattccttggcatcatgttcctgctgaactggatctcggtacgcggcttcggcgaagcggagtactggttctcgctgattaaagttgccaccgtgattatctttatcatcgtcggcatcatgatgatttttggcatctttgaaggcaccacgccggcgggctggagcaactggggcattgatgatgcgccgtttgccggtggctttgcggcgatgattggcgtggcgatgattgtcggtttctccttccagggtaccgagcttatcggtattgccgcgggcgaatcggaaaatccggagaagaacattccgcgtgcggtgcgtcaggtgttctggcgtatcctgctgttctatgtctttgcgattttgattatcagcctgatcatcccgtataccgatccgagcctgctgcgcaacgacgttaaagatatttccgtaagcccgttcaccctggtgttcgagcacgccggcctgctctcagcggcggcgatcatgaacgcggttatcctgacggcggtgctgtcggcgggtaactccgggatgtacgcctctacgcgtatgttgtataccctggcgtgcgacggaaaagcgccgcgcattttctcgaagctgtcgagaggcggcgtaccgcgcaatgcgctgtatgcaactaccgtgattgcggcgctgtgcttcctgacctcaatgttcggcaaccagacggtttacctgtggctgctgaatacctccgggatgaccggctttatcgcctggttgggtattgcgatcagccactaccgtttccgtcgtggatacgtgttgcagggtaacgatattaataacctgccgtaccgctccgggttcttcccgttggggccgatcttcgccttcgtactgtgccttatcatcacccttggccagaactacgaagccttcctcaaggatactattgattggggcggcgtggcggcgacctacatcggcattccgctgttcctggttatctggtttggttacaagctggtgaaaggtacccgctttgtgcgctacagcgaaatgaagttcccggaacgctttaaaggctaactttatacactgccgcttccgataaagccctctttaaaagagggcttttttatgcctgcaagacttacaaacggacacacttcttcataattgtattgataattgtaatcattatccttatcatttcggcaaattcaggatgaagccaatctccaaatcttgccgctcaaccatgaaaggcaaggggcgaccagccacatcgactgtaaaaaatatgcgcgcagccgccagagccgcgtgtcgacaggatgtgcaagcagcaccctttgtttgatttgtagttgacctcatggagatttggtatgttcaggttaaacccttttgcccgggcgggactgtgcgcgtccgtcgtagcattggcatttccggcactggccgcaaatgatgacgaaacgctggttgtcaccgccgcggcgactgaacagagcgtcaaagatgccccgccagtatcagcgtgatcacccaacaggacttgcagcgtaagccggtgcagaacctgaaggacgtgctgcgcgatgtgcctggcgttcagctcaccaacgaaggggataaccgcaaaggtgtcagcatccgcggtctggatagcagctatacgctgatcctgatcgatggcaaacgcgtcaactcccgcaacgccgtcttccgccataacgatttcgatcttaactggatcccggtggactccatcgaacggattgaagtggtgcgcggaccgatgtcttccctgtacggttccgacgcgctcggcggcgtggtcaacatcattaccaaaaaaatcggccagaaatggaccggtaccctcagcagcgatgccaccattcaggaacatcgcgatcgcggtgacacttataacggccagttcttcaccagcggcccgctgattgacggcgtgctgggcatgaaagcatacggcagcctggcgaaacgcagtaaagacgatcagcaatcttccagcaacgccgcgggcgaaacgccgcgcattgaaggttttaccagccgcgacggcaacgttgagttcgcctggacgccaacggagaaccaggacattaccgccggctacggtttcgatcgccaggatcgcgattcagactcgctcgacaaaaaccgccttgagcgtcagaactactctttgacccataacgggcgctgggatgtcggcaatagcgaagtgaaattctacggcgagaaagtggataacaaaaatccagggcaggcgggcactattacttctgagagtaatgcggtcgatggtaaatatgtgatgccgctgggcatgatcaaccagatcgtcaccctcggcggtgaatggcgccacgataaactcaaagatccggtgaacctcagcagcggcggcaaatcgacttccgccagccagtacgcgctgttcctcgaagacgagtggcggatctttgaaccgctggcgctgaccaccggcatccgtatggacgatcaccaaacctacggcgatcactggagcccgcgtgcgtatctggtctataacgccaccgataccgtgaccgtgaaaggcggttgggctacggcctttaaagcgccttcgctgctgcaattgaacccggactggaccaccaattcctgtcgcggtagctgcagcattatcggtaatccggatctgaagccggaaaccagtgaaagctttgagcttggtctgtattacagcggtgaagagggctggctggaaggtgttgaaggcagcgtgaccgccttccagaacaacgttgacgatatgatcgacatcctgcgcacctccagcgccagcgaagcgccgggttacccgaacttcgtcggctggaagaccgtgaacggtaagcgtgtgccggtattccgctacttcaacgtcaacaaagcgcgcattaaaggcgtggagaccgaagtgaaggttccgttcggcgaagagtggaaactgacggtcaactatacctataacgatggtcgcgatctgagcaacggcggcaataaaccgctacagacgctgccgttccataccgctaacggtacgctcgactggaaaccgcttgaagattggtctttctacgtcacggccaactataccggtgagcagcgtgcggtaagcgcgacgggtaaaaccccaggcggttataccatgttcgatatcggcgccgcgtggcaggtcagcaaaagcgtgaaactgcgctccggcgtacttaacgttggcgataaagatctgagccgcgacgattacagctacaccgaagatgggcgtcgctactttatggccgtcgattaccgcttctgatcgcgataaaccgggcagccgtcgctgaagtagcttcagtggcggctgccccgataaaacgtgtacgccgctatccgccaggtatcagccgcttgcccctttcatccaccaccttttctccatcctctttgctaaatgcgccttgctgcgggtcgggcaggatatccagtaccacttcagaaggccggcataaacgggttccccgttcagtgaccacgatagggcgattaatcaggatgggatgagcgagcataaattctattaactgctcgtcagtgaacttgtcatctgcgagtcccaactgagcataaggttcaacattctcgcgtagtagagtacgcacagcgatccccatatctgcaataagcttaaccagctcatcgtgagtcggcggtgtttcaaggtaataaataacggtgggctcattaccgctgttacggatcatctccagcgtattccgtgacgtaccgcaggccgggttgtgatagatggtgatattactcatatgagtatctcgttatagagtgagagagagccgcagcgccagcgcggccagagtgacaaacagcacaggtagcgtcatgatgatgcctgtgcggaagtaatatccccaactgatggtcatgcttttctgcgacagtacgtgcagccacagcagggtcgccagactgcctattggcgtgattttggggcctaaatcgcaaccaatcacgttggcgtagatcatcgcttctttgataacgccagaagcgatgcttccttcaatcgacagtgcgcccaccaggaccgttggcatattgttcattaccgacgacaggaaagcggtcaggaagcccgtgccaaacgttgccgccagcagtcccttatccgccagcatattcagcacacccgacagatattccgttaagcccgcattgcgcagaccgtagaccaccaggtacatacccagcgagaaaataacgatctgccagggcgcgccgcgcaatactttaccggtattgatggcgtgaccttttttcgcaacggcaaacagaacagcggcaccgacagcggcgatggcgctaacgggcagccccagcggttcaagaacaaagaaaccaaccagcaacaaaagcaaaacaacccagccagctttgaaggttgcgggatctttaatcgcgctggcaggtgttttcagcaaagtgacgttgtaagttgccggaatatcccggcggaaaaacagatgcagcatgcccagcgtggccgcgatggcagcaatatcaacaggaaccatcacagaggcgtattgcgtaaaaccaagccggaagaaatcagctgagacaatatttaccagattggaaacgataagcggcaggctggcggtatcggcaataaacccggctgccatgacaaaagctaatgttgtccttttgctgaaccccagagcgagcagcatggcaataacgatgggagtcagaatgagcgctgcgccatcgttagcaaacagcgccgcaacggtcgcgcctaacaggataatccaggtgaacagcagacgaccgcgcccgttgccccagcgggagacatgcagcgcagcccattcaaaaaagcccgattcatcgagcagcaggctgatgataatcaccgcgataaaagtcgctgttgcgttccagacgatattccagacaacgggaatatcactgggatgaataacgccgcaggccagcgccagtactgcgccaatactcgcgctccagccgatgctgaggcccctgggctgccagataaccaacaccagcgtgaataaaaagagactaccggccaacaacattctctactccaatatatgcgtttctatatatgtatcaacaggtggcgcacgctgttttcttgcgccattcgtcaatatcttccctcatgctctgcctggtcgtggcaatgatctccgccgcccaggccggcatatggggcgagaggcgatagtggacccatttcccttgccggcggtcgagtaccagttcagattcacgtaatatcgccatatggcgagatattttcggctgggattgcccggtggcggcacacagatcgcagacgcacagttcgccggactcacgcagcaacatgatgatggctaaacgggtttcatccgccaggattttaaacagctggataggctttatcatggttgaccagattatcatggggtacatatatgctaaatcatatgtattgtgttttaaataacaaattatcgccgttgcgacaagacagttcctgacgatgatataaagccgggcaagcggaggatgcccggcggagcgaaatagagggttacttaaacagatgtttcgcgtggaagcgcagatgatcttctataaaggtggcgatgaaatagtagctgtggtcgtagccgggctggatacgcaggctcagcggccactgtttttgccgcgccacttccgccagcaccgcgggctgcagttgggcgccaagaaactggtcggcgtcaccttgatcaattaatgtgggaatggcatccccggtctggcttgcctgcacgagtgcgcagctgtcccactcttgccagatcgcttcatcattgccgagataggcgctgaacgccttttgtccccacggaactttgcatgggttaacgatcggcgcgaaggccgagacgctggtaaagcaccccgggttttttagcgccatgatgagcgcgccgtggccgcccatcgagtggccgctgatggcgcaacgaccggcgaccttaaactggcggttaatcaactgcggtagctcatcgcgcaggtagtcgtacatgcgaaaatgcgccgcccacggcgcctgagtggcgttgaggtaaaaacccgcgcctttaccgagatcgtaaccggcatcatcagcgacgtcatcaccgcgtgggctggtgtcgggcatcaccagcgcgatgccaagttcggcggctacacgctgggcgccagccttggtggtgaagttttcgtcattgcaggtcaaaccggatagccagtacagcaccggcggcggggtagcttccatcgtcggcggtaaaaaaatgctgaacgtcatcgcacagttcagggtactggagtgatggcgccagcgctgctgccgaccctcgtaacagcgatgttcttcaagcagttccatccagggctcctcgggtatctatgtgtaatgcttaataatacagatatttcattaaccagtgagtaactttcactttcccctcacgcaaagctattgcatcattaatacaagttataaagaacgtctctgaacatctacagtacttatgattgcgcgcggtagcggcggggctcgctggcgtggcgcgtcgacaacgtccaaccgcagcggtaaaaatgaaaggttgcgccaatttcaataattatcgtgacggctactggattatgtgcgccacctcacgcacaatgagtgcaaactttgccctcagaagagcaaagagcgccacacctgcaggagaacctaaatgtcatcattgagtaaagaagccatactcgttcatgaagcgctggtcgctcgtgggctggagacgccgctgcgtccgccagtacaagaaattgataatgaaacgcgcaagcgtctgatcgccgggcacatgactgagattatgcagctgctgaatcttgatctcagtgacgacagcctgatggaaactccgcatcgcatcgctaaaatgtacgttgatgagattttctccggtctggattacgccagattcccgaaaatcaccgttattgaaaacaaaatgaaagttgacgagatggtaacggtacgcgatatcacgctgaccagtacctgtgaacatcactttgtgacgattgacggcaaagcgacagttgcttatatcccgaaagattcggtgattggcctgtcgaaaatcaaccgcattgtgcagttctttgcccaacgcccgcaggtgcaggagcggctgacgcagcaaatcctcaccgcgctgcagactctgctcggtaccagtaacgtcgcggtatccattgacgcggtgcactactgcgtgaaagcgcgcggcatccgcgatgcgaccagcgccacgaccaccacttcgcttggcggtctgtttaaatccagccagaatacccgccaggagttcctgcgcgccgtacgtcaccacaattaattcggagcagggtgcatggagagaaacgtcacgctggacttcgttcgcggcgtcgccatcctcggcattctgttattgaatatcaccgccttcggcttgccgaaggcggcctatctgaatccggcctgggccgggagtatttcgctgagcgacgcctggagctgggcaatcctcgacctgtttgcgcaggtaaaattcctcaccttgtttgctctgctgttcggcgccggattgcaaatgttgctggtacgcggtaaacgctggatccagtcgcggctgacgctgcttgccctgcttggttttattcacggtctctttttctgggacggcgatattctgctggcctatgcgctggtggggctgattgcctggcgcatggtgcgcgatgcccatcatgttaaatcgctatttaataccggcgtagtgctatatctcatcggtattgcggtgctggtattgttggggttgatttccggcaacggcgccagtcggtcatgggtgcccgatgccgcgaatttgcagtatgagcagttctggaagctcaaaggcggtctggaggcggtgagcaatcgcgcggatatgctgtccgataacctggtggcgctgggcgtgcagtacggctggcagctggcggggatgatgctaatgggcgcggcgctgatgcgttgcggttggttgaaagggcaatttagccttagccactaccgccgcgtcggggctgtgctgattattgccggaatgatggtaaatgtgccggccatcgccgcgcagtggtacctgcactgggactaccgctggtgcggttttctgctgcaggcgccgcgtgaacttggcgcgccgctacaaaccatcggctacgccgcgctggcgtggggattctggccgcatttatgccgcttccgtctggtcggggcgattgcctgcgttgggcggatggcgctcagtaactatttactgcaaaccctgatctgcaccacgctgttctatcatctgggcctgtttatgaaatttgaccgttttcagctgttggccttcgtgccggcggtgtgggccgttaatctccttttctcgcagttttggctgcgtcatttccgccaggggcccgttgagtggctatggcgacagttaaccctgagagcctccgggacatcatccagagatacatctgtataacgatctcgatcacaatcattaacaaaatggatgtaaccgtttccagccgtgtgacctcactcacgtagcgcggtgcgcgtcgctgccagaatagccaccttgctgaacacaggaggtgggtgtgacgtattgcaatgctattaaggtgggtatccatgatcaccattcgtgatgtcgcccgtcaggcgggggtttccgtggcgacggtttcacgggtgctgaacaacagcgcgctggtgagcccggatacccgggaggcagtgatgaaagcggtagcgcaactgggctatcgaccaaatgccaatgcccaggcgctggcgactcaggttagcgataccattggcgtggtggtgatggatgtgtcagacgcttttttcggcgcgctggtgaaagcggtggataccgtcgcgcagcagcatcagaaatatgtgctaatcggcaacagctaccatgaagctgaaaaagagcgtaacgccattgaggtgctgattcgccagcgctgttctgcgcttatcgtgcattcgaaagcgttaagcgatgctgaactcggcgactttatgcagcatattccaggcatggtgctgataaaccgcattgtgcctggttttgcgcaccgctgcgtgggtctcgataacgtcagcggcgcgttaatggccacgcggatgctgctcaatcacggccatcagcggattggctatctttcttccaaccacggcattgaggatgatgaactgcgccgcgaagggtggagtaaagcgctgcaggagcagggcataatcgcgccggatagttgggtgggctcgggttcgccggatatgcagggcggtgaagcggcgatggtagaactgctggggcgtaatttaggactgaccgcggtgtttgcctataacgacagtatggctgccggggcgttaaccaccctcaaggataacggcattgccgtgccgcagcatctctcgctcattggtttcgatgacattcccatttcccgttacaccgatccgcagctgaccacggtgcgctatcccattatgtcgatggcgaaattggctaccgaactggcgctacaaggggcggcagggaaactcgatagcgacgccagccactgttttatgcccacgctggtgcggcgccattcggtgacgcaaaagcaaagtgtggggccgatcactaactgaatctatcaaccgatgtaaccgctttcaatctgtgagtaaattcacagtatattaacattcagctgtttatgatggcagcgttgaccagtccgaaccagactgtacgggtgatgcgttaaaatatcatcttaaacaataggttaggcacttgatgaagccgtttttctggagcgttaccctacacggaagacagaattaacgttgtgaatatcgttgtgcggtaaccctaatgtaacaactcccgccagctatcttcacgccaaaaaaaacgatgcaaaataataaaaccggagattccatgaataagaaggtcttagctctgtccgccgtcatggctggcatgctttttggcgccgcagcgcatgccgcggatacccgtatcggcgttacgatctacaagtatgacgacaacttcatgtccgttgtgcgtaaagctatcgaaaaagacggcaaatctgcgccggacgtgcaactgctgatgaatgactcgcagaacgatcagtccaaacagaacgatcagatcgacgtgctgctggcgaaaggggtgaaggcgctggccatcaacctggttgaccctgcggcggcgggtacggttatcgacaaagcgcgcgggcaaaatgtgccggtggtgttctttaacaaagaaccatcgcgcaaggcgctggatagctacgacaaagcctactatgtaggtaccgactccaaagaatccgggattatccagggcgatctgatcgccaaacactggaaagcgaacccaaactgggatctgaacaaagatggtcagattcagtttgtcctgttgaaaggcgagccgggccacccggatgccgaagcgcgtacttcctacgttatcaaagagctgaatgaaaaaggtcttaaaactcagcaactggcgttagataccgccatgtgggataccgcgcaagcgaaagataaaatggacgcctggctctccggcccgaacgccaacaaaatcgaagtggtcatcgcgaacaacgatgcgatggcgatgggcgcggtagaagcgctgaaagcgcataacaagagcagcattccggtgttcggcgtcgatgccctgcctgaagcgctggcgctggtgaaatcgggcgcgatggccggtaccgtgctgaacgacgccaacaaccaggccaaagcgaccttcgatctggcgaagaacctggcagacggcaaagagcccgctgctggcaccaactggaaaattgagaataagattgtccgcgtaccgtacgtaggcgtagataaagacaacctcagccagtttatcggtaaataagttcttcatgcattgcgggcgcgctcagcgcgcccgattattcctgataccgaagccgattttgctgcgatataacttatcgtcgcggatcgtcacgaacgcagccaggtataactatggtcagcaataatagcgtacagtcgggcgaatatttgttggaaatgagtgacatcaacaaatctttccccggcgttaaagctcttgataatgtcaatctgaaggttcgtccgcactctatccatgcattaatgggcgagaatggcgcgggtaaatcgacattattaaaatgcttatttggaatctatcaaaaagattccggcagtattctttttcagggaaaagaaatcgatttccattcggcgaaagaagcgctggaaaacggtatttctatggtgcaccaggaattaaacctggtacttcaacgttcggtcatggacaacatgtggctgggacgttaccccaccaaaggcatgtttgtcgatcaggataaaatgtatcgcgataccaaagcgatatttgatgaactcgatattgatattgatccgcgcgctcgtgtggggactttatcggtatcgcagatgcagatgattgaaattgcgaaggcattctcctatgacgccaaaatcgtcattatggatgagcctacttcatcgctaaccgaaaaagaggttaatcacctgtttaaaataatccgcaagctgaaagagcgtggctgcggtattgtttatatctcccataaaatggaggagatatttcagctatgcgatgagattacgatcctgcgcgatggtcagtggatcgccacccagtcgctggaggggctggatatggataagatcatcgcgatgatggttggccgttcgctgaaccagcgttttccggataaacaaaacaaaccgggcgaagtgatccttgaagttcgaaacctgacatcgctgcgccagccgtctattcgtgatgtctcattcgatctgcataaaggtgaaatcctcggcattgccggactggtgggcgctaaacgtaccgatatcgttgaaacgctgtttggcatccgcgaaaaggccagcggcacaattaccctgcatggcaaaaaaattaataaccatagcgctaacgaggcgataaaccacggctttgcgctggtgaccgaagagcgtcgttcgacgggaatttatgcttatctcgatattggctttaactcgctgatatcaaatatcaagaagtataaaaacaaggtcggtttgctggataattcgcggatgaaaagcgatacccaatgggttatcgattccatgcgggttaaaaccccaggccatcaaacgcagatcggttcgctttccggcgggaatcagcagaaggttattatcggccgttggttattaacccagccggaaatattaatgcttgatgaaccaactcgcgggattgacgtcggggccaaattcgaaatttatcagctgattgccgaactggccaaaaaagataaaggcatcattattatctcttccgaaatgccggagctgctggggattaccgaccgtatactggttatgagcaacgggctggttgccggaattgttgagaccaaaaccacgacgcaaaatgaaattctgcgtcttgcatcattgcacctttgagatcaggggctttccatgagtgcgttaaataaaaagagttttctcacttacctgaaagagggtgggatttacgttgtacttttggtcttgctggccattattattttccaggatccgaccttcttaagtctgttgaacttaagtaacatcctgacgcaatcctcggtacgtattatcatcgcgctcggcgtcgccgggctgattgtcacccaagggaccgacctttccgccggacgtcaggtgggtctggcggcggtggtagcggctaccatgctgcaggcggtggataacgccaacaaggtgttcccggagatggcgaccatgccgatcccgttggtgattctgctggtctgcgcgattggcgcggtgattggcttgattaacggtatcgtcattgcctatctcaacgtgacgccgtttatcactaccctgggtacgatgatcatcgtttacggtattaactccctgtactacgactttgtcggcgcgtcgccgatttccggtttcgacagccacttctcgcagtttgcccagggctttgtcgctttaggttcattccgcctgtcgtacattactttctacgcgctgatcgctatcttcttcgtgtggatcctgtggaataaaacccgtttcggtaaaaacatcttcgctatcggcggcaacccggaagcggcgcgtgtctccggcgttaacgtggcactgaacctgctgatgatttatgccctgtccggtgtgttttacgccttcggcgggctgctggaagccgggcgtatcggctcggcgaccaacaacctcggctttatgtacgagctggatgcgattgccgcctgtgtggtgggggcgtttccttcagcggcggcgtgggtacggttttcggcgtggtgaccggggtcattatctttaccgtcatcaactacggcctgacctacattggcgtcaatccatactggcagtacattattaaaggggcgattatcatcttcgccgtggcgctggattcactgaagtacgcgcgtaagaaataagattgaacgcataaaaaacccgcgcctggcgcgggtttttttatacttcaaatcgatgaaacgacggcggctatttttctttctgtagctccagcaactgctcgggcgtgaccgccgggtaggattgcgcgtcctccggaacttcatgccgctgcgccgggatggggatcagcggcccgaggaaacgcggttcgcgtttgaagatatagagatccgccagcgcgccaaatcgggcgccaaactcgcgaagacgtacggtccacatatccttcggcgaaggtaccgcatagcattgcgcctgaatccccatatgcagggcgataaacagcgcgcgctcgcagtggaagcgctgggtgataataataaaatcattggtatcgaacactttgcgggtgcgcacgatcgaatcgagggtgcggaaaccggcgtagtccagcacgatatccgccggatcgacgccggctttgatcagatcgcggcgcatggtcatcggttcgttatagctttgcagggcgttgtcaccgcttaacagcagataattaaccttaccgctattgtaggcgttgagcgcgccctggatccgataacgataatactgattgatcacgccggtgcgataatatttggcagtgcccaacaccacgccaacctggcggtaggggagatcctgcagctcatcgtaaatataaggcgcggttttccagctcatccagcggtcaagacccagcacggtcaacagcagcaggccgagcaggactaacaggctgtataacacacgctttaacatgaacttgactcaatggtggacgagggaagcttcaggctactttacccgccgggtaagcgcaagaaaccatcgtttaattgcggggattttcagcaatatggcagattaccgaatccaggccggagaagccaaaggcgcatccggcaatctgctcaggctatcaggctaattaacctaacagcacgcggtcgatattctgacagcccaacgctttcagggttgcaacggtcgcatcccactggataagcgatgcatcggctttctcggccaacagcgcgcgctggatatccggatagtcgtaaccgttaaggctcagcaggttcagcgccccctgcagcggcggtagcgtcggattgaacgccgcgttttccgcgtagctgccgcagaaaatggtgccgtctttcagctccagcgccacgccggaaggggagttgctgtacggcgcgtggcagcggttcgccgcctgaatagccgcctgcgtgagcgcatcgccgctaaggggaagccgtgatcctgctcatccatcaacagagttttgatttccaggtctttcggcccaaaggcgtccggcagatagtgctgcagggagtgcgcttcgcgacccggcagatgaatgcgcagcgccagaccgctgttcagttcgttcataaactggcgacagtggccgcaaggcgtgtagttgacggtaatggcgcgcagggatttttcgccccgcagccaggcgtggctgatggcgctctgttccgcgtggacggtttgttgcatggtggcgccgaggaattccatgttgccgccgaagtaccagcgaccgctcacgccgcgggcgatagcgccaacgttaaagtgagaaagatcggcgcgggcgcaggcggcggctagcggcagtagcgcaaaggccagcgcgtcttcatccaaacctgttgcttgttgtagcgtcgccacctgatcggcttcgagcagcgccgggaagtgcgggtctgcgagcatcggggcgatggccgcctgcaggtctgccgccagattagtcaaagcagcttgaaaacgagagtgcatagcgttgcctcataacaatgtaatgggaagctagtgtacgggcccgtacgggacccatatgtgacataggtctcatagtttatgcaacgataatttgttgcatttataaatgtgatgtaaatcacaattacccgacaacagcgacgatcaccgggaacagaaaaggcgcgaccagcgaggtaataattccgcacagtaccagcgccaacgagctaaacgccccttcctggtagtccagttcggcacaacgcgcggtgccgagggcgtgcgaggcggtacccatcgacaggccgcgggatgctttagtatgaatgcgcatggcgttaagcagcgtatggccgaacaccgcgccgaggatcccaacgaaaatgacgcacacggcgctaatcgctggaataccgccaatactgccgctgaccgccatggcaattggcgtggtgacggattttggcatgatggaagcggcgatttgcggggtggcgcccatcagcagagcgacggtggtaccggtgatcatcgccacgcagctaccgatgaagcagatggtgatgatggatttccaacgcgcgcggatctggtgcagttgctcatacagcggaaaggccagcgcgaccaccgccggctgcagcagatcgttaaggattttgctgccggcaaaatagcgttcataagaaataccggtgaccagcaggaaaggaataatgaccaccatggcgaccagcagcgggttgagcagcggaaatttaaaccgcgccgccagcttgcgggcaagaaaaaagacaatcagcgttaacggtagcgaccaccacatttcatggatcattttttacttcctttttgcccgatgattttgcgttcaccgtggaccagatgcgagctccagctcaccaccaaaaagactaataaagtactgacggcgcaagacaccgccaccgggcccagctgcgcgcgcagcaaatcccagtactgcattacgccaacgccgataggcacgaacagcagcgccatgtagcgaataagaatgttgcagccggggttgacccactgcggaggcataatttgcagcgccaagagcacaaacaagatcagcatgccgataatgctgccggggatcgtgatgggcagcagcccggcgataaaaatgcccgcatacaagcaggcgtaaatcaggacgaaagctcgcgcgtactgccagataatattcagcgacttactcatggtaataacccttgatgaactgccattcatcatacaattaaaccctgaaatgtgctaccgatcacatcatgaattctacgcatcgtcagcatagaaaatgggaacagcggccttattctgcgaggtagtgcagaaagcgagtgagcgcctgcgacggtacttcgcttttgcgccagaacaccccaacgctacctttttgttcaatacgcggcaaattcagaatcgtcagctgccgatgttcggcgtaatgctgcgccagccgcaaagaaagaatagagatcatatcgctgctttgcagcaaattgctggtgacattcattgaggctgactcgatagtattctccggcagcatgacgccgttatcgaccagcgcgttatcaatactctgacggatgggcgtgccggtaggccagactatccagcgccaggcggcaagatccgcccagctcagacgcggcatgctagccagcggatggtcgggacgggcgacgaagcacaccggttcggtatagagcacacgatagttgagcggcagctccagcgcgcggccgccaacacgtccgacgaccacatcgaccacgccggagagcaggtcgtgcagcagcggggtcatcactttttcttcgatattcagatgcagggtcggcatctctttaagcagggcgaggatggcctgcgccacgcagtctgtcgccacaggggaacaaccgatcatcaggctgccgaccagcccgccttgcttaaagcgctcgatctcatactgcgagcgcgacatgtcgttgattagccgctgggcgtgctggagcagcagtttaccgccttccgaagggcgcaggcccttactgtggcgctcaaagagcggcatgccgacttcttcttcaaattgcgtcagccacttagagagtgcgggctgggtaatattcatcattttcgcgacctgagtgagattgccttgctcacccagcgctaccagcattttcaaatgctgcagcttcaacttttgcgtccagtttgccatcaatcgataacctccaggttatgtctatgcccgaaaagccattgtacatttcatcgccatggttacaaaatcgcaacataaaagaaataaatacaacatctaccctgacctgcactgaggcatcattatggctcaacgacgtgaactacagacgttacttaacgcagcgccggttggcgccctgcagtggcgtgtgattatctgctgttttctggtggtgatgcttgatggatttgacaccgccgccattggctttatcgcccccgatatccgcgttcactggcaattgagcgccagcgacctcgcgccgctgtttggcgccggactattgggattgaccgccggggcgctgctctgcggcccgctttccgaccgattcggacgtaaacgggtgattgagttttgcgtcgcgctgtttggcctgttcagtctgctctccgcattctcgacgaatcttgagatgctggtgatcctgcgtttcctcaccggtctgggattgggcggggcgatgcccaacaccattaccatgacctcggaatatttgcccgcccgccgccgcggcgcattagttaccctgatgttctgcggcttcacgctgggttcggcgctgggcggggtggtgagcgcccaactggtggcgcatatcggctggcacggcattctggccttaggcgggatcctgccgctgctgctggccgtcgcgctgctgtgggcgctgccggaatcaccgcgctggcaggttcgtcgcgggctgccgcaggcgaccatcgccaaaaccgtcagcgctatcaccggcgagcgctatcctgagacccatttctggctcgacgaaccggcagccgggccgaaaggcagcattagccagctgtttgtcggccgccagttgacgatcaccttgatgctctgggtggtgttctttatgagcctgctgattatctatttgctctccagctggatgccgacgctgcttaaccatcgtggtatcgatttacagcacgcttcgtgggtgaccgccgcgtttcaggtgggcggcacgctcggcgcactgttgctcggcatcctgatggaccgtttcaatcccttctttgtgctggcgctaagttattgcctgggcgcgttgtgcatcgtgatgatcggtttaagcgaaaacggtttgtggctgatggcgctggcgattttcggcaccgggattggcgtgagtggttcgcaggtaggcctgaatgcgctgaccgccacgctttacccaacccagagccgcgcgaccggggtcagctggtccaacgccatcggccgctgcggcgccattgttggttcgctctccggcggcatgatgatggcgatgaatctctctttcgacacgctgttttacgttatagcggtaccggcggcgatcggcgcggtgatgctcatcctgctgatgctggcggttcgccgtcctggatctgtacccgacgcgctgccctctgcgggtgtcgcgaataaataaggagaacaataatgaccctatctactccgcaatcgaaccgcgaacgccagcagttctaccagcatattgccgggcagaatctgaccccgctgtgggaatcgttgcaccacctggtcccgcaaacaccgaatgccaactgcgccccggcgtactggaactatcaggaaattcgcccgctgctgctggaaagcgggcagttaatcggcgctaaagaggcggtgcgtcgggtactggtgctggagaacccgcagctgcgcggccagtcgtccattaccgcgtcgctgtatgccggcctgcagctcatcatgccgggcgaggtggcgccgagccaccgtcacaaccagtcggcgctgcgttttatcgtggaaggccacggcgcgtttaccgccgtcgacggcgagcgcacgccaatgcgccccggcgattttattctgactccacagtggcgctggcacgatcacggcaatcctggcgatgaaccggtggtctggctcgatggtctcgatttaccgctggtcaactatctcggctgcggttttgctgaagattatccgcaggaacaacagccggtgacgcgtaaagagggcgattacctgccgcgctacgctgccaatatgctgccgctgcgccaacaggtgggaaattcctcgccgatttttaactaccgttacgaccgtagccgcgaggcgctgcatgacctgacccatcttggcgaggccgacgaatgggacggctacaagatgcgctacgtcaacccggtcaccggcggctatccgatgccctcgatgggcgctttcctgcaactattgccgaaagggttccggtcgcgggtggcgaaaaccaccgacagcaccatctaccacgtagtggaaggtagcggccaggtgacgattggcgaacaaacctttgcattccaggcgaaagacatcttcgtggcgccaacctggcacggcgtatcgttcaacgcctctgaagagtgcgtgttatttagcttctcggaccgtccggtacaggaggccttaggcctgttccgcgaagcgcgttattaataagaaggaaaacaatgatgactcaatacgtttttgccccccaggcgtcgattagtatccccgttgttggcagcgatgagcagttcccggtacgccgcgtttactgcgttggccgtaactatgccgcccacgctcgtgaaatgggcttcgatccggatcgcgaaccacctttcttcttttgtaaaccggcggatgcggttgtgccggtggcggctggcgaaacgctggatctgccgtatccggcgcagaccgacaactatcactacgagattgagctggtggtcgccatcggcaaagcgggacgcgacatcccgctggagcaggcgcaggaatatatctggggctatgccaccggactcgatatgacccgccgcgatcgccagatggagatgcgccagatggggcgcccgtgggagataggtaaagcgttcgatctttccgcccctgtcgcgccgctgcataaagccgccgaggcgcgcgaggtgaatcaggccgggatctggctgcaggtgaatggtgaagatcatcaacgtagcgatatacgccacctcatctggtcggtaaatgaaaccatcagctatctctcgggcttttttgaactgcagcccggcgatctgattttcaccggcacgccggagggtgtcggcgcggtggtgaagggtgatgtgattaccggcaacgtagatggactgacgcctatcgccgttcgcgtggtgtgaggtgaacaatgaagctgtacagtttttttaatagctctgcctcataccgggtgcgcatcgcgttggccctcaagggcatcgattatcagagcgtgggggtgaatatccgcatcggggagcagaatgcgctggagtaccggcggctcaatccggttggtctggtgccgacgcttatcaccgatgacggtgaatcgctgggccagtcgctggcgattgttgactggcttgaccgccactacccacagatgctgctgctgccgcaggaggatcccgcgcggatgcgggtgctggagatggtctacgctatcgcctgcgatattcatccgattaataacatgcgggtcttgcgctaccttagcgacgagctgaaggtcagcgaagaggacaaaaaacgctggtatgcccattggatccagcaggggctgagtgcgctggagcaactgctgcgacaatcgaaatccggcgctttctgcgtcggcgataggccaacgctcgccgactgttgtctggtgccgcaatgggccaacgcgcagcggatggggtgtgatttgagccattatccgcgctgccaggcggtttacgacgcctgtacccggctaccggcctttattgccgccgcgccggaaaatcaacaagacaaaattccggcctagggaggagggaaaatggcgaaagtgacgcgagcaattatcgttggcggcggcattggcggcgcggcgacggcgctctctctggcgcgccaggggatcaaagtgatgctgctggaaaaggcgcatgaaatcggtgaaatcggcgccggtattcagctggggccgaatgcgttttcagcgctggatagcctcggcgtcggcgaagtggcgcgccagcgtgcggtgtttactgaccatatcacgatgatggatgcggtgaatggagaagaggtagtgcgtatcgggaccgggcaggccttccgtgaccatttcggcggcccgtatgcggtgatccatcgggtggacattcacgccaccgtctgggaagccgcgctgacccatcccggcgtggaataccggacttcaactcaggtggtggatattcgtcagaccgccgatgacgtgacggtctttgatgaccagggtaatagctggaccgccgatattctgctgggctgcgacggcgtgaagtcagtggtgcgccagagtctgctcggcgatgcgccgcgggtcaccggccacgtggtgtaccgcgcggtgatcgaggccgccgacatgccggaagacctgcgtattaacgcgccggtactgtgggccgggccgcattgtcatttggtgcattatccgctgcgcggcggcaaacagtacaacctggtggtcaccttccatagccgcgaaagcgaagagtggggcgtgcgcgacggtagtaaagaagaggtgctctcttactttaaagggattcatccgcgcccgcggcagatgctcgacaagccgacttcctggcgccgctggtctaccgccgaccgcgagccggttgcaaagtggggcaacgatcgcattaccctggtcggcgatgccgcccatccggtggcgcaatatatggcgcagggcgcctgcatggcgctggaagatgcggtaacgataggtaaagcgctgcagcagtgcgacggcgacgccgctcgcgccttcgcgctgtacgagtcggtgcgtattccgcgtaccgcgcgaattgtctggtcaacccgtgaaatgggacggatttatcacgcggcgggggtcgaacgtcaggtacgcaatcttctctggaagggcaaaacgcaggatgaattttaccgcggtatcgagtggctttacggctggaaagaggataactgcctcgaaccacgctaacgtctggtattgaggtctttcaaccgacgcacagaggcgctaccatagcgcctcttttttttccgggtaacgatatgcgtgtattactggcgccaatggaaggcgtgctcgattcgctggtgcgcgagctgctgaccgaggttaacgattacgatctgtgcatcaccgaatttctgcgcgtggtggaccagctgctgccggtaaaatcgttctacagactgtgcccggaactgcaccatcaaagtcgcactccgtccggtacccgggtgcgtgtgcaattgttggggcaatacccgcaatggctggcagaaaacgccgcccgcgcggtggagcttggctcatggggcgtggatttaaactgcggctgtccatcgaagctggtgaacggcagcggcggcggcgcgacgttattgaaagatcccgagcttatctatcgcggggcgaaagccatgcgcgaagcggttcccgatcacctgccggtgacggtgaaagttcgcctcggctgggacagcggcgaacggcgctttgaaatcgccgacgcggtacagcaggcaggcgccagcgagctggtggtgcatggccgcacgaaagaggatggttacaaagctgaacgcatcaactggcaggccatcggcgaaatccgccagcgcctgactattccggtggttgctaacggcgaaatctgggactggcaaagcgcgcaggagtgcatggccgtcaccggctgcgattcggtgatgatcggccgcggcgcgctcaacgtgccgaatctcagccgggtaattaaatacaatgaaccgcgtatgccgtggccgcaggtggttgagttactcaaaaaatatacccagctggaaaagcagggggataccggtttatatcacgtggcgcgcattaagcagtggctgggctatttacgcaaagaatacacggaagcgcttggcgtctttaatgaaattcgcaccttgcaaacctcagccgatatagcgaaagcgattgcacgttattagataaggcggtgctattccgtacgcactttattaattagcactcattcctgcacgatacgacgcgagctgtatcacgtttttattccctcgcgcttgagtcgccataagaagttgatacagtgcaatagttggattgctactgcttcggcaggcgaaacctgattacctggcatttgtcggggtcaggtttttttgtttctggggttcatatgctaatcgccaaagtacttaataataacgtggtggtagtggtcaacgagcagcagcgcgaacaggtggtgatggggcgagggctggcctttcaaaagcgcgtgggcgactcgttggacgaaagtaaaattgaaaaagtcttcgccttacaaagcgatgaactggttggccgcttaggcgaattactcagtcagataccgttagaagtgatgaccacctgcgatcgtatcatcgacctggcccgcgggcggttgggaaagttacaggaaagtttgtacatcaccttaactgaccactgtcactttgccatcgagcggcagaaaaacggcgtcgcgattcgcaacgtgctgctgtgggagattaaacggctgtatccgaaagagttcgaactgggtcaggaggcgagggccatcatcgcccgccggctgggcgtcgagcttgccgaggatgaagccgggtttatcgctttgcatctggtgacggcgcagctcaacagcgaaatgccggaagtgatgcacgtgacgcgggtgatgcaggagatcctgcaactggtgaagtaccagctacagcttaactatgacgaagagtcgctcagctaccagcgctttgtgacccatctgaagtttttcgcccagcgcatgttaacgcgtacggtagtgcaggatgacgacgtcacgctgcacagcgcggtgaaagataactacgctaaagcgtggaagtgcgcggaaacggtggcgaagcacttgcaaaagaattatcaacgggcgctgaccaccgaagagattatgtttcttgccattcatattgaacgggtaagaaaagaggggcgttaattcccccacaaaactggattgttactgcatgatgcaggcaaaacctgagcgcgacgccaaccggcgtggttctcgggtttttttatttttaatactcagtcgccggttgtctgtgggcagcggcagtaaggaaaagagcatggaatataaagcactcgcgcaggatattcttaaccgcgtcggcggcaaagagaatattgtgagtctggttcactgcgcgacacgtctgcgtttcaaattgaaagataatgcgaaggccgatgccgaagggctgaaggcgaaccccggcgtgatcatggtggtagaaagcggcggccagtttcaggtggtcatcggtaaccatgttcatgatgtctggctggcagtgcgccagcaggcgggttaagcgacgacagcgaaccggtgacacaggagaacgcggcaaaaagctcggtgttaagtcagctaatcgacatcatctccggcatctttaccccttttattggcgtgatggcggcgacgggtctgctgaaaggtctgctggcgctggcgctaacctgcggatggctcacgccgcaacagggaacctataaaatctggtttgccgccagcgatgcgctgttctttttcttcccgctgtttcttggctacaccgccggcaaaaagtttggcggcaacccgtttatctcaatggtgatcggcggcgcattaacccacccgctgatgattcaggcctttgaagccagtcagacgggggcgccagtggagcactttctcggcatcccggtgacctttattaattacagctcgtcagtgatcccgattatcctcgcctcgtgggtctgctgctggatggaacgtaagagtaacgcggtgctgccgtcggcgatgaagaacttttttaccccggcaatctgtctggcggtggtggtcccgctcaccttcctggtgattggcccggtcgccacctggctgagccatctgctggccaacggctaccagttcatttatgcgtttgccccatggctggcgggcgcggtactgggcgccatgtggcaggtgtgcgttattttcggcctgcactgggggctggtgccgttgatgatcaataacatgacggtgctcggccacgactccatgctgcccattatcctcccggcggtgattgcccaggtgggcgctgtgctcggtattttcctcgccacccgcgatgcccgccagcgggtactagcggggtcggccttctccgccggcctgtttggcattaccgagccggccatctatggcctgaccctgccgctgcgccgtccgtttatcttcggttgtgtcgccggggcgattggcggggctatcactgcgttcagcaacagttatgcctactcgtttggcctgccaaacatctttttcccggcgcagatgatcccacccggcgggattgatgccagcgtctggggcgggcttatcggcaccggcgtggctttcgtgctcgcctgcgtgctgaccttcttcgccggcatgccgcgcgccagcgccgcaccgggcgccgtgacggtagccccggcctcggcaaacgatattctggcgccgatgagcggcagcgttatcgccctcgagcaggtgccggacagcaccttcgccagcggcctgctcggtaaagggattgccattatcccggcggtgggcaaagtgattgcgccattctcgggcgaagtggcctccctgtttcagactaaacacgccattggcctgcagagcgacagcggcattgagctactgatccacgtcggcattgataccgtcaaactcgacggcgtaccgtttaccgcccatgtcaaagaggggataaagttcaggccggcgatttgctgctggagttcgatcgtcaggccattttggacgccggttacgacctggcgaccccaattattatcagcaacagcgatgattaccgtagcgttgagattgtgtccgcgagcgtcgtggatgccggccagccgctgttgtccgtcagccattaatcacaggagagagcgatgaaaacattcccgcagggttttttatggggcggcgccaccgcggcaaatcaggtcgaagggcgtatctggaagatggcaaaggtttatccacctccgacgtacagccgcaaggggtattcggcgacgtcgtggagcgcgtcgcgggcgacagtggtattaaagatgtggcgatcgatttttaccatcgttacccgcaggatatcgcgctgtttgctgagatgggcttcaactgtctgcgggtctcgatcgcctggacgcgtatcttcccgaatggcgatgacgccgagccgaacgaagccgggctggccttctacgacaagctttttgccgagatggccgcgcacaacatcactccgctggtgacgctatcgcactacgagatgccgtgggcgctggtgaaaaactatggcggctggggcagccgcgaggtgattggctttttcgagcgctacgcccggacggtatttagccgctataaaaatcaggtcaaactgtggctcacttttaacgaaattaatatgtcgctgcatgcgccgatgaccggcgtcggcctgccggccggtagcagcaaaggcgaagtttatcaggctatccaccatcagctggtggccagcgcgctggcggtcaaagcctgtcatgaactggtaccgcaagggaagattggcaatatgctgctcggcgggctgatgtatccgctgagctgcaagccggaagatgtctttgaaacgctgcagcaaaaccgcagctggcagttctttggcgacgtgcagtgccgtggcgcctatccgggctacatgcagcgctatttccgcgaaaacgatattacgctgaccatcaccgacggcgaccgggaagcgctgaaagagaccgtcgattttatctcctttagctactatatgaccggctgcgtcaccgctgatgaagcgctgaaccaacaggcgcgcggcaacattctcagcatggtgccgaacccacatttggcaagctcggagtggggctggcagatagatccgctggggctgcgtacgctgttgaatgtactgtgggaccgctatcagaagccgttgtttatcgttgaaaatggtctgggggcgaaagataaaatcgaagccgacggcagcatcaacgatgactatcgcatcagctatctcaacgatcatctggtgcaggcgcgcgaagccattgctgacggcgttgaactgatgggctttaccagttgggggccaatcgatctggttagcgcgtcgaaggccgagatgtccaagcgctatggttttatctatgtcgatcgtgacgatcgcgggcaggggacgctcgaacggcgtaagaagaaaagttttgcctggtatcaggcggtgattgccagcaacggtggtagcctgcaggaataagccattcggcggcccggttgatccgggccgcatgccgtttaagccggtttaccggcgcgcagtaaaaagatcatcggacgctctttttcttcctccagcgccggttgggctgcgatttgttcggcgctcgggccccattcatcaagctgctcaagcacaaaaccggcggcgatgagcgcgttaatccagcttgacagtttgcgatgctgtttaaccacccctcggcaaaccagttgctgatacgttcgccttcctgctgatagtggctgaccggccagcgtttttgcccctgttcatccacctgccagccctgctgcagcggtgcggtatagatggggtgttcggcggaaaagaccagcgtaccgccgggaaccagcgcctgatagatcgtggcgaacagcggcgcgatatccggcagataatgcagcgccaaagaactgtagaccagatcgcagctatcggcgggcagcgtcagggtttgcaggtcggcgcagcgatattcgatagtcttgccggtggtcatctcccgcgcccgctccagcatccggctggagagatcgaaaccgattatctgttttgctccctgttgctgcgcccagcggcaaaaccagccgtatccgcagccgagatcgaccacccgcaggccagctaacgccggcagcagacgctgaattgccggccactccggcgcgccgtcaagccccttcaccgaacggtcaagggtcgcgtaaccggcaaagaaaccgggatcgtcataaatgttctgactcattaccactccaataataactttgtttatttttagctgactcattgtcaatgcacacgctttacttaacgaacgtcattcaattaatttatgatgaccaacctttataagtaacccgacctgaagaatgaaccttacactgagcaaaagcgtgctggcggcactgccactggccatcgcgctggctggctgcgcgccatcgcatgacattggcggccctctacagcagcaaactccggcatctcatgtttcgatggatctgcccgccgcggtaaaaaatggctggccgcacaccgactggtggaaagactaccacgatgcccagctggataatctgattcagcgcgcgttagctaacgccccggacatgcaaattgccgcgcagcgcatcaaactggccgaagcgcaggcgcgaatgtcgcaggcgaatctcggcccagagatggatttttccgccgatatcgaacggcagaaaatgtccgcggaaggcctgatgggaccgttcgccaccgataccgacggcaataccggaccctggtacaccaatggtacctttggcctgaccgccggttgggatcttgacctgtgggggaaaaaccgtgcgttggtgaaagcgcgtatcggcgaagtgaaagcccaggtcgccgagcaggcgcagacccgcgagctgctggccagcagcgtggcgcgcctgtactggcagtggcagaccgaagcggcggtcaaaacggtgctgcagcaggtcaaaagcgaacagaataatattgttagcgtcgataccgcgctctatcaacgtggcatcaccaactccgccgaaggggcggagaacgacattaacgtcagcaaaaccgatcagcagctggccgacgtggcgggtaatatgaaagagattgaagcgcggctgatggcgttaaccaatagtcagagccagtcgcttaatctgcgtgcggcgccgctgcccgcggtcagcgcgcagatgccgagtgaactgggctatgaactgctggcccgccgtccggatctgcaggaagcccactggtatattgaatcctcgctaagcgaaattgatgcggcgaaagcggcgttttatccggatatcaacctgatggcgttcctgcaacaggatgcgctgcatttaagcgatctgttccgccattcggcgcagcagatgggcgtcaccgccgggctgacgctgcctatctttgatagcggcaggctgaatgccaatcttgatatcgccagcgcgcagaacggtctgtcgatcgctaaatacaacaaagccgtggtcgatgcggtgaaccaggtagcgaaaaccgcaagccaggttgagacgctgatggagaaaaaccagcagcagcagcaggtggagaaagacgcgcagcgggtagtcaatctcgctcaggcgcggatgaacgccggtatcttacccggctcccgggtaagcatggcgaagctacctgcgctacaggagcgaatgaccgcgctgcgcctgcacggccagtggctggacgccagcattcagctgacttcagcgctgggcggcggttatcaccagacgacaaaataacggtatcaatagcggcgcgcggcgccgctattgattatcatcctctgtatcttcctcttttcttttcgcttcccgacgtttcagccacaaatggaccccgaccaccagcgccaccacgaggatcagccagatccagtgtttaacgtgctgatcgagatggtgcagccacgggccgatagcctcgccgccaaggtagccaagtgtggtaaagatcagcgcccaaacgatggcaccaaaaatattcagcggtagaaatatttttggcggcaagcggctggcgccgatcaataccgggccgataacccgaaagccgtacataaagcgggtgccgataacgaacagatagggatggcgctgaatcaggcgctgcgctttacggatgcgcgccttctgccgtgagaagcggcgcagtagcttaccgccgaactgacgcccgaggaaatacaacagctgatcgccgatcatgccgcctaaggccacagaaatgactaccagaggaaacttcaatagaccctgatgtgccgccacgccgccaaggatggtgatggtttcaccttctgcgatgctgccgataaccagcgccgcgtagccgtattgggaaatcaggtgattgatatccatataaacataaactcctactcttactagtcccttaatcatacaccctgatgattaaaacgcgctgaagcggatttttatcgctggacacaaaataatctacagagtgaattatacttgaatcagtgctgtacgaagccgtgacaagggggacgctatgaaccatgtctggggactcttctctcatccaactcaagagatgagcgtgattaagagtgaaaatgagaccgtgtcgcaccactacacgcaccatgtgctggtaatggcggcggttccggttatctgtgcctttatcggtaccacgcagttaggctggaacttcggcgacggcacggtaattaagctctcgctgatgaccgggttggtattagcggtactgttttacgccgtgatgttagcgggggtggcggtgatggggcgggtgatctggtggatggccagaagctatccgcaacagccgtcgctgaaacgctgtatggtctttgccggctacgtcgcgacgccgctatttttaagcgggatcgtggcgctctatccgctggtatggctgtgcgcgctgataggcaccatcgcgctgttttacaccggttatttgttgtatctgggtattccgaccttcctgagtattaataaggaagaggggctcagcttcgccagctcaaccctggctatcggggtgctggtgctggaagtgttgctggcgattaccgtcgtgctgtggggctacgggtaccgactcttctaatcaaatgcattgccggcaaaaatgaataattatgtcggcaatgcagcatttactcacgattcttattggcctcagggcgttatgacgcggtatgatggcgtttgccagcggcgtagctcactttacgccgcggcgtacgttttatagcgtgcaaaaatacttttcagaatgcccatgatgccgaattttcgaatttctttgctcagcctgactttgctgctggctgtgccttttgcgccccaggcgatagcaaaaaccagtgcggtaaccgccgcttcacagccggatatcgcttccggtagcgcgatgatcgtcgatctggcgaccaagaaaatcatttacgccagccagcccgatttggtgcgcccgatggcgtcgatcaccaaagtaatgaccgccatggtggtactggatgcgcatttaccactggacgagatgctgaccgttgatatcagtcagacgccggagatgaaaggtatctattcccgcgtacgacttaacagccaaatcagccgccgcaatatgctgctgctggcgctaatgtcctcggaaaaccgtgccgccgccagcctggcgcatcactatcctggcggttataacgcctttatccgcgcgatgaacgccaaagcgcaggcgctgggcatgacccacacgcgttacgtggagccgaccggcctgtcggtgcacaacgtctccacggcgcgcgatctgactaagctgctgatcgccagcgaacaatatccgctgatcggtcagctaagcaccactaaagaagataccgccacctttgcgcatccggcttataccttgccattccgcaataccaaccatctggtgtatcgcgataactggaatattcagttgaccaaaaccggctttaccaacgccgccggccactgcctgattatgcgtacggtgattaatcaacgcccggtggcgctggtggtaatggatgcgtttggcaaatatacccatttcgccgacgccagccgtttacggacctggattgaaaccggtaaggtgatgccggttccggcgtccgcattgagctataaaaagcagcgtgaagcgcagatggcggaagcgatgtttaaaggcggcacgcagaccgcgcagaacgattaatttgtcctttccccggattgcgccgcaatccgggaattttgatatcactccggtaacgtccagtcgccgtcgccaagctggcgttgcatgattagggtatcgcgccagtcgcccatcttatagccgacgctgcgcagttgtccggcaacggtaaagccaaatttcttatgaatggcaatcgaggcggcgttgttgtggccgtcgccgataatcgccagcatctgccgccacggcccctgttcacattgcgcgatgaggcgcgtcagcagcgcgctgccgatgccgcgaccgcccatgccggactcaacgtatatagactcttccaacgtatagcgataggccgggcgagggcggtaaaaggtggcgtagcagtagccgacaatggtgccccgccacagcgcgaccagccacggaagcccgttatcgcgcacgcttttaattcgcttgcgcatttcgtcgacggtaggcgggatctcttcaaatgaggcgcggccgttaagcacgtgccagacgtacagcgcggcaatcgcatgcgcgtcatcaggcaacgcttcgcggatctctaagtcggcgtcttgtaacttatccttggcggacatggggctcctcaagctaattggccggagagtctttttctccggcatgcagcgtaatacagaagccccgcggctgaacagtcctggttgatgattattgtgcttccgtcggcttctgcgcctcgccccagtattttgtttgctggttttgccgatccccggattcatgctgttggtgggatcgttctggcgatagaagcgttttaaactctccgccgcttcatacagatgcccgacgttgtgctccgccgggtactgcgcgccgcgcgctttcaacagcgccagcattttttccttcagttcgtgcgcgtcgacccctttcttcacgatgtaatcctggtggaagacgtgacacataaagtggccatagtagagcttgtagaccagctggctgtcgatttccgccggcagatgttcgaaccattcggtgtcattgcggcgcagggcgatgtccagcgccagaatatcttcgacttcgtcggcatgtaccgcctgatagcggatcgccgcgccggctgcggcgaagcggtgcaggaatgccttgctgccttcttccgcggtacagacaaagaaatcgccttcagcctgctggaaatactccgtaagccacttctgcgcttcttcgatgccgtcgccggccatcttcagcagcagatgatgttcgtacttatcacgccaggttttcatgcgctccggcaggtgcgccgggaaggcgtgaccgagcttctgcataaagcggtcggtgaagtgcggcttgaacagggagactttttccagcatcgcgtcggtgcgccccttcatggtgaagaagaacggcattttgtcggtgccgagcttatcgatcatcaggaaggtgtctttgccatatttttcggcgatatcgtaaatatcgcggtgcatatattcaccggctaccggcagattattgaattcagcgaggatgtggcggcggatttcggtgaacacttccggctgattggtgccgatatagaacacctgctggcgcttttccgccggaaaagtatcgagacgcacggcgaagaccgccagcttgccggcgcagccggaggattcgaacaggcggtccgggtcggcgttatagcgtgcgggggtatcggcgttgacgtcgcgcacgcgggtgacgtagtcgtgatcgtgggcgtggcggccatcgtgctgcacgtctgcatcattgatacggtcatcgtcgaggcggctcaggatttgctccggcgttgagccaagatcgattcccagatggttgactaacttcagcttgccgtcggcgtcaatctgcgcaaacagcgacatttcagtataggccggtccgcgttgcaccagtgaaccgccggagttattacagataccgccgatgacggatgcgccgatgcaggaagagccgatcaccgagtgcggttcgcggcccagcggttttagcgctttttccagtgaatagagggtggtgccagggtaggccagcacctgctcgcccttatccagcaggtgcagcttatccagacgcagcgtgctgataatgacgatttcgcgatcgtaatcattgccgctcggggtggagccttcggtgaggccggtgttcgccgcctgcatcaggataattttgtcagcttgaacgcagacgctgagaacccgccatagttcaagcagggtaccggggaacaccaccgccagcgcatcgccgtggccggagcggaaaccttttcggtaacgctgggttttcgccggatcggttaacagatgagaggagccaaccagccgcgccagttccgccaaaaagggagggttatttattgttgttgcagatgacatgattcactccttgtgggcacaggaaagctatatcgctcttagcataccgctttgtatgacaatttggtgcatgaatgtttctataaatcagataagaaccttagcattctacgggcgcgttgtttatatatatggcaaactgcggtttttgctgcgttttcgctgggctattagcaccgaatcaaagagggatacataataatgaaatggttgtgtactgttggcgtcgccgtgagcctggcgctgcaacccgcgctggcggatgaactgtttggtaaccatccgctgacgcctgaggcgcgagatgcgtttgttagcgaactgctgaaaaaaatgacggtcgatgaaaaaatcggccagctgcgcttaatcagcgtcggtccggataacccgaaagaggcgatccgggaaatgatcaaagacggtcaggtaggggcgatttttaataccgtgacccggcctgatatccgcgtgatgcaggatcaggtgatgcagctaagccgcctgaagatcccgctgtttttcgcctacgatgtgctgcacggccagcgtaccgtcttcccgataagcctcggcctggcctcctcttttaatctcgacgcggtgaataccgtcgggcgtatctcggcctacgaagcggctgacgatggtctgaatatgacctgggcgccgatggtcgacgtctctcgcgacccgcgctggggccgcgcctccgaaggttttggcgaggatacttacctgaccaccgtgatggggaaagcgatggtggagtcgatgcagggtaagagcccggcagaccgctattcggtgatgaccagcgttaaacacttcgccgcctacggcgcggttgaaggtggcaaagagtacaacaccgtcgatatgagcccgcaacgcctgttcaacgactatatgccgccgtataaagccggtctcgatgccggcagcggcgcggtgatggtggcgctaaactcgctcaacggtacgccggcgacttccgattcctggctgctgaaagacgtcctgcgcgaccagtggggctttaagggcattaccgtttccgaccatggcgccatcaaagagctgattaaacacggcgtcgcctcagacccggaagacgcggtgcgcgtcgcgctgaagtccggtatcaacatgagcatgagcgatgagtactacagcaaatatctgccggggctggtgaaatccggtaaggtgacgatggctgaactggatgacgctacccgtcacgtgctcaacgtcaagtatgatatggggctgttcaacgatccgtacagccatctggggccgaaagcgtccgacccacaggataccaacgccgaaagccgtctgcatcgtaaagaggcgcgcgaagtggcgcgagaaagcctggtgctgctgaaaaatcgtctcgatacgctgccgctgaaaaaatccggcactattgcggtaataggcgcgctggctgatagcaagcgcgacatgatgggcagctggtcggcggcgggcgtggccgatcagtcggtcaccgtgctgaccggcatcaaagaagcgctgggcgataaaggcaaagtgatttatgccaaaggcgctaacgttaccgacgataaaggcattgtcgatttccttaacctgtatgagaaagcagtgcaggtcgacccgcgctcgccgcaggagatgatcgatgaagccgtggcggccgcgaaacagtccgacgtggtagttgcggtagtgggcgaagcgcagggtatggcgcatgaggcttccagccggaccgatatcaccctgccgcaaagccaacgcgatctgattagcgcgctgaaagcgaccggtaagccgctggtgctggtgctgatgaacgggcgtccgctggcgctggtgaaagaggatcagcaggctgatgcgctgctggagacctggtttgccggtactgaaggcggccatgcaatcgccgatgtgctgtttggcgattacaacccttccggtaagctgccgatgtctttcccgcgttcggtggggcagatcccgacctactacagccacctgaacaccggccgtccgtataatccggaaaaacccaataaatacacctcgcgttattttgatcaagcgaatggcccgctgtatccatttggctatggcctgagctacaccaccttcagcgtttcggatgttaaaatgtcggcgccaacgatgccgcgcgacggcagcgtgactgccagcgtgcaggtgaccaacaccggcaaacgagaaggggcgacggtggtccagctttatttgcaggacgtgaccgcgtcgatgagccgcccggtgaaaatgctgcgcggctttaagaaggtgaatctcaaaccgggagagacgcaaaccgtcagcttcccgatagatgttgacgcgctgaagttctggaaccagcagatgaaatacgttgccgaaccaggcaaattcaacgtatttattggggtggattccgcccgcgttaagcagagcgaatttgagctactgtaagcgatagccctgtcaaaggggataaaccgggtattactcctgaaaggccgattaatcggcctttttttttcgttcaccggccaaatggactacgcttttctcttaagcttctgtaaacggagcgcaaaagaagagaaggaagcaggatgatggcaacgaaatggtcaggcgcgttggcgctagtggcgctggtcagcctgccgctgcaggcggcggaaccggtgaaggtgggctcgaaaatagacaccgaaggggcgctcctcggcaatattattttgcaggtgctcgaaagccatggtgtgaaaacggtcaataaagtccagctaggcaccacgccggtggttcgcggcgcgattaccgccggtgagctggatatttatccggaatacaccggcaacggggctttcttctttaaagatgaaaatgacccggcgtggaaaaacgccaaacagggctatgaaaaagttaaaaagctggacgcggaaaaaaacaagctgatctggctgaccccggctcccgccaataatacctggactatcgcggtgcgacaggaagtggcagagcaaaatcatcttacttctttggccgatcttagcgcctatctacagaagggcggcgattttaaactggcggcttccgcggagtttatcgagcgcgccgatgccctgccggcgttcgaaaaagcctatggctttaagctcaatcagaatcagctgttgtcgctggcgggcggcgataccgcggtgaccattaaagcggcggcgcagcagacctccggagttaatgcggcgatggcctatggcaccgatgggccggtggcggcgctggggctacaaaccctgagcgatccaaaaggcgtacagcccatttacgctccgacgccggttgtgcgtgaagcggttctgaaggcgtatccgcagatagcgcagtggctggagccggtgtttgccagcctcgacgaaaaaacattgcagaaattaaacgccagcattgccgttgaagggcgagacgcgaagagcgtggccgccgattacctgcaacaaaaagggctgctgaagtaaatacgagtgactattcgttgttataaccgcgtggcgctgctgctcacgctgctgctgttggccgtggcggcgctgccgtttgtcacttatgcccctaatcgtctgctctccggtgaagcgcgctggctatggacgcagatgccgtggctggcggcggcgcagctggcgggcgcgctgctgttattgctaatgtgttggctccccggccgtctggcgctgctcgttagcctgcttattgccgatttactgttgcctttgctgatgtggggcgctgggcacatcgcgctacagctggtgcaacagggatccccgctggcgcgtacctctcccggaagcggattatggcttgctctcgcgctatgcctgctgattgccagcgatattattcgccgtttgacgccgcgagcgctatggcgttggctgctgaatgcgcaggtttggctgcttccgtgcctgttgctgtggcatggttcgctcgaccaactctccttgctgaaagaatatgctaaccgcgaggatgtctttaatgacgctctgcgtcagcatctatggttattattcgggacgttgctgcccgcattgttattgggtttatcgataggctttgccctctggcgacggcctcactggcagacgccggtatttaccttccttaatgtgattcaaactattccctcggtggcgctatttggtttgttgatcgcgccgctggccggattgacgcgccattttccgtggcttggtgatattggtatttccggaactggtctggcgccggcgctaatcgccttggtgctgtacgcgttattgccgctggtgcgcggggtggtgactggcctgcaacaggtaccgcgcgaggcgctggaaagcgcaaccgcaatgggaatgagcggcggtcagcgttttcgccaggtccaaatgccgttggcgctgccggttctgctgcgcagcttgcgggttgtcagcgtgcagaccgtcggtatggcggtggtggcggcgttgataggcgcgggcggcttcggcgcgctggtgttccagggactgcttagcagcgcgctggatttggtgctgctgggcgtcattccgacgattgcgctggcggtggtggtggacgccgtgtttgcgctatggggcgcgttgctaaaaggagaggcgcatgattgagttcgacggggtgaataaagcctttgccggacagccggcggtgaaggatctcaacctgcatctgcgcgaggggcgttttcggtgctgatagggacgtcgggatcaggaaaatcgaccaccctgaagatgattaatcaactggtggaacaggatagcggagtgatacgcttcgccggcgaggatatccgtcgacagccgctgctgacgctgcgccgtcgtatgggatacgccattcagtctatcggcctgtttccacactggacggtggcacagaatatcgccaccgtgccgcagctgcaaaagtggccgcgcggaaaaattaccgagcgggttgacgaactcatggcgttgcttggcctggagcctctacttcgcgatcgttacccgcatcagctttccggaggccagcagcagcgcgtcggcgtggcgcgagcgctggcggcaaacccggaggtcttgttaatggatgagccgttcggcgcgctggatccggttacccgcgacgcgctgcagcaggagatgatacgcattcatcgtctgctcggacgcacgattgtgctcgtcacccatgatatcgatgaagcgttacgcctggcggatcatctggtgctgatggacggcggtgaagtggtgcagcagggagagccgctacagatgctgctgcagccgaaaaacgcctttgttgaaaccttttttggccgcagtgaactaggggttcggctgctctcgctacgtggcgttggtgattacctgcgccgggatgaacgcctggtaggcgatgcgctgaacgtctcgatgacgctgcgcgaagcgctgtcgcagtttgttgctcaccgccgcgacgttttgccggtggtcgatgaacagggcgaagcgtgtggtacgttgcactttgcagacctgctacacgataggggcacgacgtgaaggcgcttcgcgatccgctgctgtggctggtggcgctgtttatcgcgctgctgctggtgttgccccatagcgcgccgctgtttagctggctgtttccggagctgccgcgcccggtttatcagcaggagagctttctggcgctgacgttggcccatttttggctggtggcgctctccagcgttaccgcgacggttatcggtgttgggcagggattatcgtcacccggcccgccgggcgagagtttcgtcctctggtggaaaccatcgccgccatgggacagacatttccgccggtagcggtactggcgattgcggtgccggtgatggggttcggctggcagccggcgcttattgcgctggcgctatacggaatattgcccgtgctgcaggggacgctggctggattaagttcgatatcgcctggagtattgaacatcgccgaggggatggggatgagcggctggcagcggttgtgcaaggtggagttgccgctggcggcgccggtcatgctggccgggatccgcacctcgaccatcgtcaatattggtacggcaaccattgcctcaacggtgggcgccaacacgctcggcacaccgataattatcggcctcagcggctttaataccgcttatgtgctgcagggggcgctgctggtcgcgctcgccgcgatcatcatcgaccgcttttttgaacggctgaaccagtggatcagccgacaccgccgcgaacaataaacgagtaacctgctagcatcacaccgccgatcccgccgatggccatgcataagaagagggtaatgaccgcgattttcgcaggcttcataataggctccttttgttaacggagggattatacggtgaagcactggtgttaatgaaacattaattgctatttagccagatcagattctcctgttgttgccaatcacgaagttgggcttcctgcgggctacccggtggcgcggggcaccacaccagcagggtgctgtcgggaaacaagcgtgggtggatctggttgagggaatgcgcgacaacgtcgacccgccagccttgttcgcaggcaatccatccttccagccacaatcgggtcgtgtcatcggtattccagccaaccactaccgcatgatggccggggcgtttccaggcgtgggcgagacattgggcgatatgattgatcaatatgccgtcgagcaggctacgcagcgccagtagcgttggctgcgggcttagcaggcggtggcggagtggattaatcagatgatggaccagcgtttgcgctgaatagctgtggccgcgctcttttagccataggcgcaggcgttggtaatgacctccctgcagaaaaccgagcaatatctcctgctgttcgcgccagccgtcttcagcatcctcttcgcggtcaggtagcaggttttttaccttgctgacctgtacgccggcatcaatccagcgcttaatttcgcgaatacgctcaatttcatggtcattgaataatcgatggccgccatcggtgcgctgcggcttgataagttcataacgtcgctgccaggctcgcagcgttacgggattgatatcacaaagctgagccacttcgcctatcgtatacagcgccatttcccctcccgccgattactcctcttttaactgtagaaggggtttatcaattgttcattttttgttctttttggccgcggcgagacggtgagaagtgtgatcgtcgccgtgatttagcattttcttgtatcgcttcaaagaaagttatcgacggtcagtgtatgttacgcgctttcaaaggttgtgtggttggcgggtatgtacgagtttgatctgatattgctgctgctccagcagatgtgcgtgtttctggtcatcgcctggctgatgagcaaaacgcgcctgttcatccccctgatgcaggtcaccgtacgtctgccgcataagttgctgtgctatgtcaccttctcgattttttgcattatggggacctatttcggtctgcatatcgaagattctattgcaaatacccgcgctattggcgcagtgatgggcggcctgctcggcggtccggtggtcggcgggttggtcggcctgaccggggcttgcatcgttattcgctgggcggaatgacggcgttaagctgtatggtgtcgaccattgtcgaagggctgctcggtggtctggtgcacagcattctaatcaggcgcggccgcccggataaagtgttcagcccgcttaccgccggggcgattacctttttcgccgaactggtgcagatgctgattatcctgctcattgcgcgaccctttcaggatgcgctgcacctggtacagagtatcgcggcgccgatgatggttaccaataccgtcggcgccgcgctatttatgcgtatcctgctggataagcgggcgatgtttgaaaaatacacgtcggctttttccgccaccgcgctgaaagtggcggcctctaccgaggggatcctgcgccagggattcaacgaagaaaacagtatgaaagtggcgcaggtgttgattcaggaacttgatatcggcgcagtggccatcaccgatcgtggccggcttctggcctttaccggcattggcgacgatcaccatctgccgggcaaaccgatctcatcatcctatacgcaaaaggcgattgacaccggtgaagtggtttatgccgacggcaacgaagtgccgtaccgctgttcaattcacccagggtgtaaattgggctcaacgctggttattccgttacgcggagagaaccagcgggtgattggcaccataaaattgtatgaagcgaaaaaccgcttgttcagttcgattaaccgcacgttggggaggggatcgcccagctgctgtcggcgcagatccttgccggccagtatgaacggcagaaggcgttgctgacccagtcggaaattaagctgctacatgcccaggttaacccgcactttctgtttaacgcccttaacacccttaaggcggtgattcgccgcgatagcgatcaggccggacaactggtgcagtatctatcaaccttctttcgcaaaaatctgaagcgaccaacggagatcgtcaccctggcggacgaaattgaacatgtgaatgcctatctgcaaattgagaaggcgcgattccaggataatttacagatacgtatgcaggttcctgcatcgcttgaacatctgcagctaccggcgtttacgttacagccgatagtcgaaaacgcgatcaagcacggcacttctcagcatcttggcgtgggcgaaattaccattcgcgccagtcagcatgagcgttggttacagctggatgtggaagataacgccgggctgtatcgggataacccaatgccagcgggcttgggatgagcctggtggacagaagactgcgtacgcgcttcggcgccgactgcggaattagcgtctcttgcgaagcggaacaatatacccgtatcacgctgcgactgcctctggaggagaatgcatgctaaaagttttaatcgtcgatgatgagccgctggcgcgggaaaacctgcgcattctactggaggcgcaaagcgatattgatatcgtcggcgaatgcggcaacgccgtcgaggcgattggtgcagtgcataagctgcgcccggacgtgctgtttctggacattcaaatgccgcgcatcagtgggctggagatggttggtatgctcgatccagaacatcgcccctatatcgtctttttaaccgcttttgatgagtatgcggtgaaggcgtttgaagagcacgcttttgattatctgctcaagccgattgaaaacgcccggctggagaaaaccctgagtcgcctgcgtcaggagcgcagcctgcaggatgtatcactgttggatgatgcccgacaggcgctgaagtatattccctgcacgggccacagccgcatctggttgctgcagatggaagatgtagcatttgtgagtagccggatgagcgggatttacgtcaccgatagcgaaggcaaagaaggctttaccgaactgactttgcgtactctggaaagccgtacgccactcttgcgctgccaccgtcagtatctcgttaacatggcgcatttgaaggagatccgccttgaggagaatggtcaggcggaactgttgatgcgcgccgggcaaacggtgccggtcagccgccgctatctgaaaagcctgaaagaggcgattggtctgtaaaaacgcggaatcatggtagacttagcgccagcatttttcatcatgaaggcattatgatcagtaacgatattttacgtagcctgcgctacaccctgaaaaccaacaataacggcctggtacgcatctttgcgttggcggatgcgccggtgagtgcggaacaactggtaccctggctgaaaaaagaagacgaagaagggtttgcgcgctgcccggatgtcgtgctgtcgaattttctcaatggcctgatttacgataagcgcggcaaagacgaatcggcgccgccgttggcggttgaacgccgggtgaataacaatatcgtactgaaaaaattgcgtatcgctttctcgctgaagaccgacgatattctggcgatcctgactcagcaaaaattccgcgtatcgatgccggagatcaccgctatgatgcgcgcgccggaccacaaaaactaccgcgaatgcggcgatcagtttttacgctatttcctgcgcggtcttaccgaacgcgagcacgccaaaggctaagcgcctgacttgacccgggcctggcgcccgggccctgtctctctttacttcttcacctctttaaaaccttgcgattccagcagcttagtcgataccgatagcgaaacaaactgctgtgagcagtcggtgaacatcgatcccggcagtttgcacagttcgctgattttcgctttgctgaaatccacggtcagatgctcaagcgcgtaggaatctttatagtcgatggtctgctcaacgccctgcagattacgatacacgctgctgatcggctcgattatcgcccgtgcctgttctttattttccgcgccaatcgatttatagggaatggtgttatcggcatcctgacgtagtactttgtcgccgtcatagtggtaggtaaagctgagttcgacgccgttggtattcagcgcaaaggttttactctcttcttttttattatcgcagccagcgagggccaccagcagaacggatacggccagcatgccagccatcttgcggtttaatttcatcacgattccctatgttgagtggtattgcgcgtccagagaggagcaaacagtaatgattattatggcgattgcgcgttgtcgcaacagaaggcgtgaagggaataaaaagcgctgccggagcagcgcttttacgggggttatttaacctgctgacccggctgtgcgccgctgtcagggcttaacaggaagatatctttcccgccagggccggcggccatcaccatcccttcggagatgccgaagcgcattttacgcggcgccaggttggcgaccatcaccgtcaggcggccaatgagcgcctgcgggtccgggtaggcggagcggatgccggagaagacgttacgcttctcgccgccgagatcgagagtcaggcgcagcagcttatcggaaccgtcaacgaactcggcgttttcaatcagcgcgagacgcatatccaccttggcgaaatcgtcaaaggagatagtttcctggatcggatcatcggccagcgggccggtgaccggcgcggcggcggctttaacttcttctttagaggcttccaccagcgcttcgacctgtttcatttcaatgcgattgtacagcgctttgaaggcgttaactttgtgcgccagcagcggctgctggatggcgtcccagctcagctcggtgttgaggaacgcttcagcgcgcgcgcttagacccggcagaaccggcttcagccaggtcatcagcacgcggaacatgttcagccccatggtgcagattgcctgcaggtcggcgtcgcggccttcctgtttggccaccacccacggcgcctgctcgtcgacatagcggttagcgacgtcggccagcgccataatttcgcggattgctttaccgaactcgcggctttcccacgcttcgccgatagcggcagccgcatcggtgaaggttttatacagcgccgggtcagccagttcggcggagagcataccgtcgaagcgcttattgataaaaccggcgttacgcgaagccaggttcaccactttgttaacgatgtcggcattgacgcgctggataaagtcttccagattcaggtcaatatcatcgatgcgcgaagagagcttagcggtgtagtaatagcgcaggctgtcggcgtcgaaatggttcagccaggtgctggctttgataaaggtgccgcgcgatttggacatcttggcgccgtttaccgtgacatagccgtgaacgaacaggttggtcggcttacggaagttgctgccttccagcatggccggccagaacaggctgtggaagtaaacaatgtctttaccgatgaagtgatatagctcggcgctggaatctttcttccagtattcatcaaagctggtcgtgtcgcctcgtttatcgcacagattcttaaaggaacccatataaccgatcggcgcatccagccagacgtagaagtatttgcccggcgcgttgggaatttcaaagccaaagtacggcgcgtcacgggaaatatcccactgctgcaggccggattcgaaccactcctgcattttgttcgccacctgctcctgcagcgcgccgctgcgggtccacgcctgcagcatttcgctaaaggacggcaggtcgaagaagaagtgctcggattcacgcatcaccggcgtcgcgccggaaaccacggacttcggatcgatgagctcagttgggctgtaggttgcgccacaaacttcgcagttatcgccgtactggtccggggatttacacttcggacaggtacctttgacgaaacggtccggcaggaacatgcccttttccggatcgtagagctgagagatagtgcggtttttaataaaaccgttttctttcagacgggtatagataagctccgacagctcgcggttctcgtcgctgtgcgtcgagtgatagttgtcgtagctgatatcgaaaccggcaaaatcggtctgatgctcctgactcatttcgccaatcatctgctccggggtgatgccaagctgctgggctttcagcataatcgggtgccgtgagcgtcgtcggcgcagatgaagttgacttcgtggccgcgcattcgctggtaacggacccagacatcagcctggatgtgctccagcatgtggccgaggtggatagagccgttggcgtacggcagcgcgcacgttaccagaatttttttcgcgacttgagtcatagtgggcattacatcttctgttgtaaaaagggcttttgatgttacctgaaaggcaataatttggtaagcccaaagcttattgtgggggaattattccctttcaggtaaacttaacggacaagaatcaactcacaataacaaaggagtcgggatgagttcgcaatcccaggccaaatccccgaacgtctacgtgcgatggtcgccgggactctggctaatttccagcacccaaccctgaaacataacctcaccacgctaaaggcgctgcaccatgtcgcctggcttgacgataccgtgcatatcgagatccaaatgccgttcgtctggacccgcgcgtttgaggcattgaaggagcaatgcagcgccgagctgctgcgtatcaccggcgcgaaagccatcgactggaaactctctcatagtatcgccactcttaagcgggtaaaaaaccagccaggcattaatggcgtgaagaacatcatcgccgtgagttccggtaagggcggggtcggcaaatcctctaccgccgtcaacctcgcgctggcgctggcggcggaaggggccaaagtgggtatccttgatgccgacatctatggtccgtcgattccgaccatgcttggcgcggaagacagccgcccgacatcgccggacggcacccatatggcgccgatcgtgaagtatggcctggcgactaactccatcgggtatctggtgaccgatgacaacgccatggtgtggcgcggcccgatggccagcaaggcgctgatgcagatgctgcaggagacgctgtggccggatctggattacctggtactggatatgccgccgggaacgggcgacatccaactgaccctggcgcagaacattccggtaaccggcgcggtggtggtgacgacgccgcaggacatcgcgctgatcgacgccaaaaaaggcatcgtgatgtttgagaaagtagaagtgccggtcgtaggcatcgtagaaaacatgagcatgcatatctgcagcaactgcggccaccacgaacctatctttggtaccggcggcgccgagaagctggcggcgaagtaccacactcaactgttgggccagttgccattgcatatcacgctgcgtgaagatctggataaaggcacgccgacggttattgcgcgtccggaaagcgagtttaccgatatctaccgccagctggcggggcgcgtggcggcgcagatgtactggcagggcgaagttatcccgagcgagatcgccttccgcgccgtttaaggctgggtgtaacgcatcagccaataatctccgtcaggagacgcgccctgggcttcgagtttccagccgtgatgctggtagaagcgcagggcgttttcatttcgcgacagacacttcagcgtaccactgtgcttgaatgagcgctgaacctgttccagcagcaggctaccgacgccttttccctgccactgcggatccacaaacaggttatgcaggaagttgtcgataacccacaccgaggcgaatcctgccagcacatcgccgcattcggcgacccatagctgttcgtctcgcaccacggcatcaaaatcttccagccgccattgatcgccgttaagccatgtccacgacgcaagacgtgcgtcaagaaacagctgacgcaggcgagggtagtcgctgtcgcggccaggacgaatacgcaactgcggcggcattgagaacttagcgatgatagaagatctcgccatcatacactttcaggatcttgccctcggtgtcggtgattagaacgtagttgccgcccatgtaggtccagtggctgccggcatccggcgcgggcaggttacgcaattgccactgtttgatgttgtactcggatgtgaggtacatcgccggcacggtatcgccaatatgaaattgggtaaaatcagcggtgaattctttcatcgcatactgttcaatcccggaggccggcgccgcccagcttgcgctggcgctggcaagaagtacgcccagaagcatcatttttgttttacgcatattttcctcaatattacctggactcaaaatagcagcctcgtatcattcctgaagcgctgctgaaatggcaagcactggttttttaaaaagtgtaagcaaaactcggttgaagtcttgtgccgcttgcgttgttgcgcggtaaatcgctattttgggagcattctgaagcaggggagaattggcatgttcaggctggaagatctgaccttatttgtccgcgcggcggcgttaggcagttttagcgaggcggcacgagaagcggggcagcagccagcgcaggtcagcgcggcgatcaaacgcctggaaacgacgctcaacattcgcctttttgctcgttcgactcgtagcctgcgcctcaccccagagggcgaaacctggctgccctacgccacccagatgctcgataccctacaggccgggttacagaaaattcagacgccagggatgaagtacgtggcacgctgcaaattgccgtgccatccgatcttgggcgtaacctgctgctcaaggtgttttgcgcttttcgtgaacgtcatccggcactgcgcctgcggctgcacttttccgatcatctaaccgacgtgtttaaagatccggtggatgtcgcttttcgctacggctaccacgaagacgcttcgtttatctcactgcccgtcgcgccagaaaaccgtcgggtgttggtggcttcaccgcagtggatagcccgccacggtcagatcagtagcctggaggagttatcccggcacagcgcgctgttgtacgtattacgtggccggccttttgaccgctggccgctgatttcaggtaatgaagtgcataccgtggagatgaacggcgcgattatgagtgatgatgcggaggtgatccgtcggctggcggtagccggggagggatcgcttataaatcgtttcttgatgtcagcgacgacctgcgggaagggcgtctggtgcggttgctgccggactttcagggcgatttaacgccgctgaacatgatttgtccgcaccgcaaacagctctctgccgcggtgcgtttgttatatcaagaggtgaaatcacattgtgaagcgcttagtgcttaactaaggtcgcgaagtaatagattagcgggatcgccagcacccacaggccaatcggaatttcacgccacttgccggcgatcgctttgatgacaatgtaaaacagcagcccgccggcaataccggtgccgaagctgttggcgattagcgtaatcatcaccatcattaacaccggtagtccgtcggtaaagttacccagatcgactttgcgcaggccgctaaacatattcaggccaatcagaattaacgctggcgcggtggcctctttagggatcatgagtgccaccggcgtaaacagcagcatcaacaggaacataaccgccgccgagagcgcggtgaggccggtcttgccgccggcttccgccgccgcggatgattcaatcagcgccgtagccgctggaataccgacccaagggcccagcgcggcggcaatcgaatcgaccataaacgggcgattaatctgcggcatgttgccttcttcatccagtaagcccgcctcgccgccgaccgccagggtcgtacccatggtcgagaaaaactcggacgcgaaaaagacgaacaggaacggcaggaaggcaatatttaatgcccccaacagatcgatttgcccgaacaccggagccagcgagtgcggaacatcaataaagctacccggtagctttgttaccccaaacggaatacccaccagggtggcgaacagaatggcccacaatatcgcgcctggcactttacgcgcctgtagcgctatcgccagaaacaggccgcacagcgccaccagcgcgccgggggcaagaaaatcaccgagcatcagggcgttggttttggcattcgccaacaccagcccggcattgcgaaagccgagcaccgcaacgaataacccgatcgaagccgtgagtcccagcttaattgactgcggtaccgagcgggtgaccacttcgcgtaggccgaattgggtcaacaggaagaagaggatccccgaccagcaggcaatcccgaggccaatctgccagccaataccttcgctgcccgccagcgtcaccccaccagtaccgagccgccaatgcccggaccaacgataaacggcaggttggcataaaacgccattaataacgaaccggcgacaaagaccaggatggtgccggtggtggcggcgcctttatccattccgccaatcgccagcagtcctggaatgaccaccagtaaataggcggcggcgagaaagccggtgatcccggccagacattcggtgcgtagcgaaccgccccgtgagtgcagcgcaaagcggcgctccagccagtggctacgggcagaagtatgaagtgtgttatcggccatgctcaggctccctgaggattattgttgtgatgagttggcgccggagtctcccggcaggctatcaacgggtcaactatctggcgactgccgccgtcggtgagacccaaatcggttagatgcggcccggcattacaggcaaggcaggtgccttcaatcgccttaaatactcggtatggcggctcccagtcggcgactttactgcttaaatctcgcagctcgcggaactgccgcgccagctcggtggcgggaagatcggagagcatgccggcaattggcatcgccacatgggccaggatctcgccctgttgcgccagcgccattccgccgccggaagcgatcagctgatttgccgctaaggccatatcatgagcatcgcgcccgagcacgaccaggttatgtgagtcatgcgagtagctggtggcaatggcgcctcgcagctcgccccagccttcgagcagggcgatttgcggcgttgcctgatggcggccgtggcggtgcttcacccaaatcaggctaaagcccgcgggcagttgtacttcgccgtcgcggatctgtacttctacttcgccccatttcgtgaagcgcgcgccgctgatgtggcgcaggcgggcgacgccatggcgaatgcccttaattcgcagaataaagtcttcagtagcgaggggggctaactgcaaggtatcacgcggtggcgtcacgccgggcgcggcggcaagggggttagcaggcggccgttacgagcgataagtttgccgccgacatagacctcctgagcgtcgagtttctccagcgaatcaaacaccaccagatccgcgcgtcgtcccgcggcaattagcccaagatcgttgcgctgcaggcgaatagcggcattaagggtggcgaaacgtagcacatcgaccgttggtaaaccatgttcaatcaacaggttgagcagggcgataatgccgcctttctccagcagcatatccggcggtacgtcatcggtgcagacggtgatttgcgaggagagatgcggcagcgtttttaacgccgtaacgatctcgggcagtagataggggtgcgagccgcgaatttcgatagtcagcccggcgcgcagtttttccagtgcatcggccgctgaagtcagttcgtgatcggaggtgacgccggcagcgagatatgcctgcaaatcggcgccgctgagcccgcgggcatggccctcaatcagtttgccgctgttaagcccggcctggacaatctcctgcatccgttcgctgccgttcagcacgccatgcatgtccatcacttccgctacgccgcgtacttccggccagccgagcatagtttccatttcagcgccggcgaaatcagcgccggacatttcgagacctggcgtagaggggacgctggatggcgcggccaccatcacctgtagcggcaggtggcgactggcgtcaaccgcgtagcgcacgccatcgacgccgagcacgttggccagctcatgcgggtcccagaacaccgcggtggtaccctgcgtcaggacgatttcggcgtagcgctcgggcggtagatgcgagctttcaaggtgtacgtgggtgtccatcaagccgggcgacagatagccgccttgcagcgagcgcacttcatgggcgtcagcgcggctgccgcgcggatgcacgctggcaatcatttccccaacgatgccaacgtcggcgtcgcggatttcgccagtggccatatcgacgatctgcgtatcgataagcaacagatcaaacgggactcgccgcgcgcggcctgcacggcgcgacgacgaacttcagcattgctggacataacaactccaccacaaggataatgcggatactctatgggcacagcaaacgtttgcccagatgaataaatttatcgcccgataagctcgggttattctgtaagaccattggtagcgaacctgacaatgaacgaaccctggcaacgtctgcccgcgctctcactgaaacaactgcagtattttgtgaccctggctcagttgcgccattttaccgataccgccaatcggctggcgattagccaaccggcgctcagcagcgcgctgcggcagattgaaagtgtgatcggcggcaagctggtcaatcgtaccgcctcggcggtgactctgacggaactgggggcggcgattttaccccatgcccagcggatactgagcgtggcccaggcttctttttttgatatgcagcagatcgtggaagcgggcggcgatggtacggtgcgtatcgggttggtgccgtcggtgagctcgctgctgtttccgctgctgccgcagactctggcgcaggcctttccgcgtctgcgcattgaatttcatgaccagaccaacgatgcgttaatgcgggcgctgcaaagcggtgagattgattttggtatcggcgcgatcgacagttcgctaccagctgagctactggtttatccgctgcgcgaggatccgttcgtggcggtactgcacagcgacgatccgctcgctgcgcagccaaatttaccgtggaagcagttggtaggccgtgatattgccgttttctcaaaggggaatattcagcggctggtggcggcgctggtggaaagtcaacgtttgaccttaacgacgcgttaccaggtagactatatcgaaactctttatgggctggtgcgttcgcggctggcggtggccattctcccggcgctgtatacgacctatctgcacgatccggcgttaaaggtagcgcaactgcagcagccggcgttgacgcggacggtggctctgatgcgtgggccgcaggcgcttgcgccgttaatcgaagagtgtttttctctgttacagtccgcattgcgctagggcaggtgttttatgagtacgtccaccgtcaaatggttgatgtactccagcgagtgcgaggacagcaccccagtagccggttatggtgtccggcgataattaaatcgatatggcgctgttgtacgcactcttcgacatcagcaaaacggcgggtcgtcaccagcgatagcgtctgtaccggcagggcgacggtcgtcgccagctcgttgagcagggctttggcctgaatgacttcttgcgatacttcatcattctgcaggctgtcggacacgtaattaagcgcccggtagtcggtgctgatgtgggcgatggtaatgcgcatcccgttttcctgcgccatcctggcggcgtgttgtagcaacggaacaccatcaaggctgctattaatcaataccagcgcatggtgataaacggtcatatatacctccgcgcaataaaacagtcctgaactcattttgagcctgcggcgaggggaacgcaaatcagaacatgcgaggcgagtggataaaaaatccccgcggccagcaagggcgcgagggagattcagcgattatcgcttatggggtgacaatgttgaaccagaattcaaatttgtccatgtagctcagcatttcatcgagcttagcgccattgccgctaatcttgacgtcgcccttatctttagcctgcttcagcgtttcctgtttcaaaataatcttgttcagggtatcgcggttcagagtaatactggcgtcagcgtcgtctgctaccgcattagcggtgtggttaagcacgccattttccagttccagcttgtacttaccgccatctttaccaagatcgatgttgaagaccgcttttgccgcgccggctttctggccgttgatatgtacgcccaggtagtcgaagaacatctccggagtcattgcacgaacggtatccgggctggcggtgttaggcgtcgggagcttctgtacgccgttacgcagttcctgcgcgccggtcaggtagaagttgcgccaggtaccggcttccgcctggtagcctaactgctccagggcatctgcttcgaggttacgcgcatcggcattttgcgggtcggcgaagacgattttactggtcacctgcgccacccagcggtagttcccctgctgatagtcggctttggctttctgcatgatggcatcggcgccgcccatgtattcaacgaacttcttcgcagcttgttgcggcggcagctcgtcgagggtcgccgggttgccatcgaaccagccgaggtagtaaacgtaagtcgctttcacatcgtggctgacggagccgtaataaccgcggctcgaccactgtttttccagcgattccggcagtttgaagttagcggcgatttcatcgcgggtcaggccttcgttggccatacgcagggtctggtcgttgatgtagcgatacatgtcgcgctgacctttcatcagcttgataatgttgtcgttaccccaggttggccagtggtgctgagcgataatgacttcagcatcgttgccccagcggtcgatcgcggcgttaatatattttgaccatgccagcggatcgcggatcttcgcgccgcgtagcgagtaagtgttgtgcagggtatgggtaacatcctctgccgcttcaatcattttcttctctttgacataccacagcatttccgacggtgcttcggaacctggcgccatcatgaagtcgtaggtcaggccatcaatcacttcctgctggccggttttagtgatgtagttggtcggctggagcagcgtcacggtacccgcagaggtggtggtgccaagaccagcgccgacctggcctttggcgtcaggcttcaacaggttgccgtacatatagctggcgcgacgactcatcgcggtaccggccataatgttctcggaaaccgcttcttccatgaatccggccggggcgtagatttttactttgccggccttcacgtcggcttcatcaaccacgccgcggatgccgccatagtggtcgacatggctgtgggtgaacaggacggcgacaaccggctttttaccacggttggcgtagtagagatccatcgcttctttcgccggctcggcgctcagcagcgggtcgataacggtaatccctttctcaccttcgatgatggtcatgttggagagatcgagattacggatctgataaacaccgtcggtcactttaaacaggccaccgatattaatcagctgcgactggcgccacagactcgggttaacggtatccggggctttttcaccttctttgacgaagtcatattttgccgggttccagataacgttgccttgctcgcctttaatcatggtctgcggcagcgcggcgataaagcccttatgtgcgttatcgaaatcagttttatcggcaaacggcagtttgttgtacagcgcgttatttgcctgctgagttgctggagtggcgtcctgctgctgggcggctgcgaaggcggaaagcgacagcgaagttaaaacaccggccagagccagatgtttagcgatctgatttaatttcattgaatggcctcttagattatttgttccgctatcaatgtttaatatcagcggataattcaaatgcggactaattactggccattttaaagcgaatactttgcgttgatagtcccatatgggactggtcattatcaaagaaataatcactctcgaatctgctatcacttcgctgctatactcaatatcagagcagactgcggagcaagggcatagcgtgaattttcaggatatccatagctattatcagcaactcaacattgatgccttttttccgcaaataattgttcaagggaggccctgacggttgcggcaaataaaaaattagcaattcagccaggatatatttatttttgcactgaaggttcgctgtcaatattaatgccggatagtggccttcatattggtaattccattgagtatatgccgatagggcttatggaaaggtactgcccgctggcgaagtttgaatatatcagcagcgcggcggtgaagctggttaaagtcacttatgatgtctttgaccaaatttttttacgcggcggtcctgaacgcgtgcaggagctagcgaccattctgacctatatgtcgatttttactatcgatcttcataacgaacgccggcagatgaccagctatcagaccatcaggccgatgctgtttcgttatctttatcgccagagtacccatcaggggaaaacgaaggcctggcgctgtttattattaagcgcactaatctgtcccgcacgcatgtttttcgggtgctggcggatctgaaagccggggctatatcacgatgaagcgtggcaaactggtttctattgaccgaccattgccggaagcctactagcagagagggaaaactcccgcgaccgggcgccgcgggagcaggacattatggcgtaacaatgtcgaaccagaattcgaacttgtccatatagcccagcatttcattgagcttatcggcgttaccggtgattttcgcgtcgccgttatcgacggcctgcttcagtgtctcctctttgaggatgatcttattcagggtggcgcggttgagggcaatagtggtatcggcatctttcgcttccgcgttggcggtatggttcagtacgccgttttccagctccagcttatacttgccgccgtcgctgccgagatcgatattaaagaccgatttcgcgttacccgctttctcgccattgatatgtaccgccagatagtcgaagaacatttccggggtcatcgcgcgcacggtatccgggctggcggtgttcggggttggccctttcaccacgccgttacgcagttcctgcgcgccggtgaggtagaagttacgccacgggccggattccgcctggtagcctaactgttcaagggcatcggcttccagattacgcgcatcctggtttttcggatcggcgaagacgattttgctaactacctgagcaacccaacgatagttaccctggtcgtaatcctctttcgctttcttcatgatggcatcggcaccgcccatgtaatcgacgaatttcttcgccgcttcttccggcggcagttcgtcgagggtcgccgggttgccgtcgaaccagccgagatacagcacgtaggtggccttcacgtcgtggctaacagagccgtagtaaccgcggttagcccaggtgttggcaaggctatccggtagtttgaatttagcggcgatttcatcgcgggtcagcccttcgttggccatgcgcagggtctggtcgttaatgtaacggtacaggtcacgctggctcttaagcaggttgaccacgttttcgttgccccaggtcggccagtggtgctgagccataataatctcggccttgtcgccccagcgtacaatcgcttcgttgatgtacttcgaccacggcagcggttcgcgtattttcgcgccgcgcagcgaataggtgttgtgcagggtgtgtgttacgtcttccgcggattcaatcagttttttctcttcgatgaaccacagcatttccgacggtgcttccgagcccggcgccagcatgaagtcataggtcagaccgtcaatgacttctttctggccgtctttttcaatgatattggttggggcaatcagggtaacggtacccgccgaggtggtggtgccaaggccggcgccgacctgtccggtggccgatggtttcagcaggttgccgtacatgtagctggcgcggcggctcatgacgttaccggccatgatgttttctgccaccgctgcttccataaagccggacggtgcgtaaatttttactttgccggatttcacatccgcttcatcaaccacgccgcgcacgccgccgtagtggtcaacgtggctgtgggtatagataaccgcgacgaccggtttcttaccgcggtttttgtaatacagatccatgcccactttggcggtttccgctgataccagcgggtcaacgacagtaatgccttctttaccttcgatgatggtcatgttggaaagatccagattgcggatctggtagacgccgtcggtgacctcaaacaggccgctgatgttaatcagctgcgactgccgccacaggctcggattgacggtatcggggctttttcaccttctttgatgaaggagtactgttgcggatcccataccacgttaccttgttcgcctttaatgacctcggtgggcagggcggcaataaaccctttatgggcgttggtgaaatcggtgttatctgagaaggggagttggttatagagggcgtcattggcttgtttggtggctgaggtcgcttcttttgccgcgacttccgcccatgctgacaggctgatcgatgaaagcaagccggcaatggctaatcctttcactatgggggtcaatttcattggaatcctcttatcttaatggcgattcactcgttaattccgattagacgtggtgttacaacttgtaacgcttctttgaactataaccaattgtttacattgggcaagtttgtggttacaaaaaaatacattaattaaaaaactactatctcgtaggtaaaatgagatttatccaatgggattaatgctgcttatttagcgcggcatttgacctgtcggctacgacggggaagggggaaaagcggcccttaggccgcttttaaattaacaaggaagaggcgctatttggcgtagcctaaaaatttaccgtcctgcatgacggcaatttttcctgatttgtagacaataaaaacgtataaaccctgagaataggttttcgcgtcagcattgctttcgtctaaggccgcgggtttgccatcaactgtcagcccggttgagtttgtgaccagcttcataccattgaagatcttcacttttttgctggattgcgctttctgcacgggatataaagcctgtgcattttccagcgcctgtttctccgctgcggcgttcaccgtagcctgtttgttttgttccgcaatataacaggcatctttactgatcccctgtgcttcgcattcggccatacgctgcgccggtgaactgcaaccaatcgcgatggctgcgctgagtgccagcagcagcatagaaacgtgtttcactttcatcattaacgaccttagtgtcgaaattatttttaacatgttatgcaaactaacggcagcggcgactactgcggttactgtgttcgcttagttcgtaacgcgtagtaactatgtcgtatggttattaagtgaattgtgatctaaatcaaccgccgcacggatagctaaaattttgtgtaatcgcttacatggcgcaggaaaaagtggcgtctctgtggcaaacgtacaaggatgatacaacgacgcgtaatgacggtatgcaaatcagccattatgatggcgctttctgcaaggatcataagggattatgaagtggatactgttgaggaaataaatggaacatacttttttgcggggcgttcaaaccttaccgcctcagaactatttttcatggtctttgtcttcaatactgctgatcaatttggtatcaaagatgttgcctctgtatatgcactgtatgcgggtataaatgatcaggcgacacgggctaaacctggaacggcaattcctggaacatccagactatcgaaaggtgccagacgagtatttggcaatagaatgttcccatttgggttaaaaatgcctacatggattggcggttatactccatggactgtaaaaaggaggatggtgaggaaaattggaacgtgggtgggacggactattcccctcattggtgaagtgatcattgtggctgatgtatcgcagatcatttacaacacgatcattgaatacaataccatcgcgcggggcaacgataagctatggtagaagatatcgaaaaacgcgtcatcaagttgttcactattcgtagtgggacctatatcctcaggaacaagaaatacgctacatacacggcagactcgagtattcattttgatgtccagttagatcaagatgacgttgaagagttagttgaagactatgcaaaagagttcaacatcgacatgtcgaatttccatcttgaaacgtactatcccgaagtcaatttttcatggaatccatttaaaaagcctgaaccagtagatgttccagagttcaccattgatatgtttatccagtctgccaaagccgggagatggctgtacgattaagggacatatcgccagtagatctaccgcttttaccgtttacaagacttatcgctggcattactatcctgattaaagattaacggaacgttagtcgccattttgtaccaaatgactcggggtgcccttctttgtgaaggctgagaaatacccgtaccacctgatctggataatgccagcgtagggaagtcagagaccgcatggtctgcgctgcttcctcatctggcgggagcaaaccatgcatcaaccgctaaatccggcgcatatcgcgcacctgcagcagcttttccgcacctcttcgccgcttgttcactgtatgaccaacgatgtggtccagactttcaccgctaacgtcctgctggctattggcgcctcgccggcgatggtgattgatcctacggaagccgcgcagtttgccgccattgccgatgcgctattgattaatgtcgggaccttaaccactgagcgcgccaacgcgatgcgcgcggcggcgcagagcgcccgccaggcgggaaaaccctggacgctggatccggttgccgtcggcgcgctgacgctacgcactgatttttgtcgcgaattactggaactgcggcctgcggcgattcgcggcaacgcctcggaaatcatggcgctggcgggagcagcggcggcgggcgcggcgtggacacgaccgatagcgtagctgcggcgttacccgcagcccaggtgctggcgcgcaagctcaataccgtggtcgcggtgacgggcgaggtggattacatcagcgacggtgagcgcacgcttgccgtgagcggcggtgatgtcctgatgacgcgggtggtagggaccggctgcgcgttatccgcggtggtggcggcaagcgccgcgatgcccggcgatcggctgcaaaacgtggcagccgcctgcggcctgatgaaaatggcgggaggtgaagcggcgcgacacggcggccccggcagttttatcccggcattcctcgacgcgttatacgcggaggtggcggcatgaagcggattaacgccttaaccatcgccggcaccgatcccagcggcggcgccgggatccaggccgacctcaaaacattttccgcgctcggcgcttacggctgctcggtcatcaccgcgctggtggcgcagaatactcgcggcgtgcaatcggtgtatcgtattgaacctgactttgtggcggcgcagttggattcggtgtttagcgacgtgcgaatcgataccacgaaaatcggtatgctggcggaaaccgatatcgttgaagcggtcgcggagcgtcttgcccgctatcagattgctaacgtggtgctggataccgtgatgttggcgaaaagcggcgatccgctgttatccccttccgccattgcgacgctgcgccagcgcctgctaccgcacgtttcactgatcaccccgaatttgccggaggccgcggcgctgctcgatgcgccgcatgcgcaaagcgagcgcgagatgctggaacagggcagggcgctgttggcgctaggctgcggggcggtattaatgaagggcggacatctggacgacgccgaaagcccggactggctgtttacccgcgaaggcgaacagcgctttaccgcgccgcgcgtgcagaccaaaaatacccacggtaccggctgtacgttatctgccgcgctggcggcgctgcgtccgcgctatgacgattggggacaaacggtcgccgaagcgaagggctggctgtcggcggcgctggcgcaggccgattcgctggaagtggggcacggtatcggcccggtgcatcatttccacgcctggtggtaaatggcagtgaaacgagacagcagaatctactgaaaaaacgcgctcccggctggaaaatatgctaactcggtaccaggcttaacctgcccataatttttgggttgggataaaacatgctggctgcggccagcacttacgggagatagctatgactgatattacgcagttgcttggcaaagatgccgacagccttttacagcaccgttgtatgactattccagccgaccaactctatttaccgggggcggattacgttgaccgggtgatggtggataacaaccgcccgcccgcggtgctgcgtaatatgcagaccctctacaacaccgggcgtctggcgggaacgggatacctctccattctgccggtcgaccagggcgtagagcattcggcgggcgcgtcgttcgccgccaacccgctctacttcgatccgaagaacatcgtggaactcgcaattgaagccggttgtaactgcgtggcttctacctatggcgtgctggcctcggtatcgcgccgctacgcgcaccgcattccattcctcgttaagctcaaccataacgaaacgctgagctacccgaccgagtatgaccagaccctgtacgccagcgtagagcaggcgttcaacatgggcgcggttgcggttggcgcgacgatctatttcggctccgaacagtcgcgtcggcagattgaagagatctccgccgccttcgagcgcgcgcatgaacttggtctggtcaccgtgctgtgggcctatctgcgcaacccggcattcaaaaaggatggtgtcgattaccacgtttctgctgacctgaccggccaggccaaccatctggccgccaccattggcgctgatatcgtgaagcagaaaatggccgagaataacggcggctataaggcggtgaacttcggttataccgacgatcgcgtctacagcaagctgaccagcgataacccgatcgatctggtgcgctatcagctggcaaactgctatatgggccgtgccgggttgattaactccggcggtgcggcgggcggcgaaaccgatcttgccgatgcggtgcgcacggcggtgatcaataaacgcgccggcggcatggggctgatcctcggtcgtaaagcgtttaagaaatcgatgagcgaaggcgtgaagcttatcaatgcggtacaggatgtctatctggacggcaaagtcaccatcgcataaggcaaaaatccgggcgcgaggcccggattgactattttacttaccccggtttccggggttttttatgattttactgtgctgacgttcagtggtttagccgcttcgctggtagcaaaaccaggctgctcaacgcgaataaacgggcacaggaagaaggcgagaatatagagcgcggtataggccaccaccacgccgatggtgctgaagtgcggcagcagcaccaccgcaatcgccggcgccaggaagttcgacagcccggccgacaggttgtagaccgaaatcgccgcccctttatgctctggctccagcgccgggaacaccgccgccatcggcacgaacgccgcgacaaaaatccccagcgcaattgccggcaccagcgccatggcgaagttatggccgaagtgctgcggcaggtagtaaaacgccaggctcgacagcgccatgccgatacagccgaaccagcgcaccactttcatccagcccagtttctccgccacgatgccccagaagacgttggagaagatggtggtgaaaaagaacgccgcccatacctgcagccattcggaagtggtgaagccgagctcatcgacgaacatcatcggcatgaccaccgcgaagccgaacagcgacagggtgttgataatgcgcacgatgctggagagcataatgctgcggttggtgtagataagggtcaccgcgcgccccagctcggagaacttctcgcgggtggtgagattctgcatatggcgcggggtttcggtgttacgcagcgccgccagggcaatcagcccgccggtgacgcagaacgccagcgccagccacagggtgcccatctcgccaatgtgcggaatggtgaagctcggaatatagctgccgaacacgccgatgccgacggagtagaccgcccagaaccagcccagggccgagctggagctgtcgctgcggacgttatggataatggcgacgataaacgagtagaggaacagcggataggccaggccgcggataccgtaaaacagcaggattaaggcgtagttggcgcggccgaggccgaagacgaggaacaggacgtggaacacgcaccacagcacgaaaccgataaacatggttttacgcggggtgatgatttccgcgaccacgccggagacccaggccgagagggcggcggcgaggccgtagagggtgaaggcgaaagaggcctgcgccgggctgaagcccagctccttgatgtagtgcgagaggaaggcgagttcaaaaccgtcgccggtcataaacacggcgatggcgacgtatccccagataagattcagcggcagaccgaaccactgttggttattaacggacatgttaacctcgatttcaggatgcagaggagcggctccgctgcacaacagcggagcattattgttattaaattaaagaggtatgttattcgcggattagccgaccggcctgttgtagcgctttgtaggcctcatacctgcgttgatgtagcgagctaaacgccgtttcgctgcgataggttttatccactctggtgaaccgcttcatggcgtccggtagcgaggcggcgacgttgcccgcgacggcgccgaggatagcggagcccagcaatactggttcgctactggcggtgctgatcacggtcacgccgcaggcatcggccaacagctggcgtaccagcgggtgctgccccgcgccgccgctgataacgatattttcgctctcaataccacaggcgcgttgggcatcgaggatctgccgcaggccgtagccaatcccacataatccggcgacgtatagcgcggtcaggttatcaagatcccgctccatccccagcccggcaatcagcgctttcgcgtgggggtcggcaagcggcgcgcgattgccgagaaactccggcacgacgtgcagtccatcagccagctgcaccgcctccgacggcgaggcaacctgcgccagcacgcgatccgccagccagaccggcagaggaacggcggcggctttggcctgttcacgcgcttcggccgccgccggatggaagctcagtaactggtcgatagccgcgccggcggcgctttgtccgccttcgttcagccagtaacccggtaccatggccgaatagtaaggccccagacccctgggacgaacaccgccttctcggtggtggtcatggtgcaggaggaggtgccgaagacgtaggccatattattcaccgcaccgttgagtacgccgacggtgccgatgccgcctgcgtgggcgtcgatcatcccgaccgccaccggcgttccgacaggcaggcccatctcttcagccgccgccgcggttaacccatcaccacagggcgttcctggatcgacaatgcgctggccgatacgagcgaagtcttcctccgccagctctgcgaggccaatctggcgaaagtagtcggcatcccagcgtttttcatgggccagataggtccatttacaggtgacggtacagacggaacgggccagatcgccggtcgcgcgccaggtgagatagtcggccaggtcgaagaaatgacgcgcggcggcaaaaatctgcggacggttttctttcagccacagcagcttcggcgtttccatctccggggagatagtcccgccgacgtactgcagcaccggatggcggctggcgttgatgcgttccgcctgttcggtggcgcggtgatccatccagacgatgatattgcgttccgcctcttcgctggggccgacggccagcggcgcgtcattctcaccgattaccaccagcgagcaggtggcgtcgaaaccgataccggcaaccgaatgcggagagacagcggccttttcgaccgcgcgtttaatgcagtcgcaaaccgcctgccagatttcgcggctggattgttccaccacgctgccggcgctgcggaagagggtgatctcccgggtggcgtgggccagtagttcgccgctgaggttaaataccccggcgcgcacgctgccggagccgacatcgacgccgataatggtttgagtctcgccattcataaaatcgtccttttagtcaccgataccgggggttataaatcaacgctgttaggcaaaataaccaggtcgcgtacggtgacgtttttcgaacgggtgaccataaacagcaccgattcggcaacttcgataggctgcatcaggctaccgttggccagcgcttcttccattttctctttcggccagtcatcgagcagggcggtgaccaccgggcccggcagtaccgcgcctacgcggacgccgtgctgggaaacctggcggcgggtggtatgaacaaacgcctgtacggcgaattttgacgcggtatagataggttcccagataaccggtaccacgccggcgatggagctggtgaaaataatatcgccggatttttgcgcgatcatatgcggcagcacgctacgcacgcagcggaaggcggcattagtattgaggtgcagcacgcgatcccagacgtccgggtcaccttcagcgaccgggccgccaatgtaagcgccggcgttagcgtggaagatatccagacgcccggcaagttgcaggatgccgtcaatgatcttatccacctgctcgccctgcatcagatcgacctgtaaggcaaaagcgttttcgccaagctctgccacaatcttgttgagcttttcgccttcacggtcgatcagaaccaccttcgcgcccgcgccaagcagggttttcgcgcattcaagaccaatgccggaagcggcgccggtgaccgcggcgactttgccgctaagagaagtattcatagaggatacggagtggttcattttataatccttcatgttgtctgttttgctcctcaagctggcctcgacgagcttgaggaacggttacctgctacaaaaatctggcctgtcagagcaggagtaactaagttaagctattgaatatcagcaccatttatttcaatttgctgatgtctgaacgattattgagtgtatacgctagcgagcgtcatggttgctcaatcgatgaagctaatgttgctccagcttcatcgattgagcaagtggggaaattaacagcgaaatgaatttgtgacgcaagttgggaaaatgaaaaaaatcactatctacgatctggcggaattatccggcgtttcggcaagcgcggtgagcgcgatcctcaatggcaactggaaaaaacgccgtatcagcgccaaacttgcggaaaaagtgacgcggattgcgcaagaacagggctacgcgattaatcgccaggccagcatgttgcgcagtaaaaaatcgcatgtcatcgggatgattgtccccaaatacgacaaccgctattttggttccgtggcggaaggctttgaagagatggcgcgtgagcgcggcctgctgccgattattacctgtactcgccgtcgtccagagctggaaatcgaagcggtgaaagcgatgctctcctggcaggtggactgggtggtggcgaccggggcgacaaatccggataaaattaccgagctatgtcagcaggcgggggtgccgacggtcaaccttgacctaccgggctccaccgcaccgtcggtgatctccgacaactacgcgggcgcccgcgcgttgaccgataaaattcttgataacagtctcaatcgccacggcaaactggcgccgctgttttttgtcggcgggcgcagcagcgaccacaacaccctggagcgtttgcgcggatttcgcgatgctcatgaggcgcgcggcatgagcgtgccggaagagaatattctttctccgggctattcaaaaggcaaagtggaagcctgcatgcaggcgcgtttcaaaagcgccgatgaacatctgcaggggttcttcgttaactcgaccatctcgctggaaggggtggtgagatggctggcgcagttggggctgaccggcgtcgagcagccccgatgggctgttttgactgggacccatttgtttatctattgggtcacgatattgacatggtgcagcagaacgtcccggcgatgctggaagcggtattcaatatcatcgacgcaggcgaagccagccagcagcgggtagagatcccgccgctgctgattagcagccgcgagcatctggcgtgaaaagccgctggcgctagcgcgtcagcagccagcgggcggtatgttcatcggtcaccaggccgttaatccagccgccttttaacgccgcgaggatcgccgggcgcttgttctcgccacaggcgacggctatccgcgggcactggttttggcggatatcgtagctggtgatcaggcgattaatttcgctatcgacgacgccgccgtcggcatcgataaagcggccgaggatctcgccgatgccgccgcgcgccgtcagttcatccagttggactttattaataaacccgtctttgaagatcgggctttgggtacccaatgggccgataccgacgaaaataacgtccgcctgctgcgcggcggcagaaacattgctgaacaggcggctgccgcaccacatctcatgttcctgacgggtttgcgcatagcgcggcgcgggccactgatagtagttggcctgaattttccgcgccagcagcaacggcacatcatcgtagtagttgcatttcccctcatcgttcattgcgctaatcagcgccacgcagcggctgttcgggctatcgaaatcaatgcgctggatggtttttttcagcgttaatccagaaccaatgccgattattttggcgttatcgctctgcaggtagcgggccatcagctgataacaaccgaaggaaacgctatccagcgtgctctcttcgttgtaggtcggcacgatattgcactcgatgagttgatacttttcctgcaacaactgcgcataatcgaggcagttcgccacaggatgatgcaagccaatcgacacaataccttcttccttcgccgcggcgatcaggcgctggaccaccggccttgaggtgccaaggtggctggcgatttcgctctgattctgaccggcaatgtagtacatccatgcggcgcggaccttctgatccagcctgatgtcgtcttctttactcacggtgtcctgccttaaatacgcgggcgcagtagcgcagatacccgcattttggctgcggttttccaaacaggcaagcttttgctctgttttggtcatttgtaatttaaatgggtaattgctcttttgtgatccgtagctcttatttgattcaaatgatcatctacagtgagccgcatcacctcaaggagagcagaacatgaatacgcaattcacatggcttcacatcggtctcggttcttttcatcgcgcccatcaggcgtggtacctgcatcgactgcgggtttccggcgattcgcgctggcatatcgcggcgggaaatattcgtaacgacgccgagcatgtggtgcaggcgctggcggagcagagagggcgctacgttctggaaacggtgagcccggaaggggagcgcgaatacgaagagatcgcctcaattcaaaaattactgccgtggcaggcgggattgcagccgctgattgatgaaggtgcgaacccgcagaccaaagtcattgctttcacggtgacggaagggggttattacctcaatacgcaacatcgcctggaaaccagcaacgccgatctgcaggccgatttgcagggagattgcaaaaccatttatggcaccatcacccggattcttgaaaaacgcatcgccgacgatgctggtccgctgacgctgctcaactgcgacaacgtgcgccacaacggcgaacgtttccatgatgggctggtggagtttctgcaactgaccggtaaacagcaggttattgactggctggcggtgaacgcgacctgcccaaacaccatggtcgatcgtattacgccgcgcccggccgccgatctggcgccacgtatcaaagcgcaaaccggcatcgatgataaagcgccggtgatgggcgaaacctttattcaatgggtagtcgaagataatttccgcgccgaacgcccggcgcttgagacggtgggcgtggagatggtggcgtcggttatcccttatgaagaggcgaagattcgcattcttaacgcgtcacatagctgtatcgcctgggcgggaaccctgttgggccagcaatatattcacgagagtacgcttaccgatgccatctacgctattgctgaccgttacgtcagtgaagatgtgatcccgtgtctgggcgataacggcatcgacctggcaacctatcgcgacgtggtactcaagcgttttaccaacccctatatccaggacaccaaccagcgggtggcggcagatggattttcaaaaattccggcgatgatcgccccaaccctgcaggaatgctatcagcgcggcgtgcgcccgcaggctaccgccatgctgccggcgctgttctttgtctttatgcagcagtggcataaaggcgcgttaccctatcagtaccaggacggaattctcgatgaggccgcggtgcatgccatgtttaattcgcctgatccgatcgcccggtacgctgctgataaagccttgtttggcgagctggcggaatcggcggattttcaggcgctgctgcgtgagcaaatcgccgccgtctacgcgctgacccagcaggaggcgctatgtatttaggtatcgatctcggcacttcggaagttaaagcgctcgtgctggatgaaaataatgcggtcgtcgccagccatagcgcgccgctgaccatccaacggccgcatccgcaatggtctgaacaatcgccgcaggcgtggtgggaagcgacggaatatctgattgccactctgcgcgagaagtgcgcgagccattggtcggcgattaaagccatcggcctttccggacagatgcacggcgccgtactgctggatgccagcggcgaagtgattcgcccggcgattttatggaacgatacccgctgcgcgcaggagtgcgccgagcttgaggagatggcgccggagctgcatcaggtggctggtaatctggcgatgccgggatttaccgcaccgaaactgctgtgggtgcggcgtcacgaaccgcagcatttcgcccgtaccgcctgcgtactgctgccgaaggattttctgcgctacaagatgaccggcaaaaaagtctccgatatgtcggatgccgccggcaccctgtggctggatgttgcgcggcgggactggtccgacgcgctgctgcaaaagtgcggcctgacgcggcaacaaatgccggaactggtggaaggatgcgacgtttccgccacgctggcggcagacattgccgaacgctggggcttaatccttcggtgctggtggcgggggcggcggcgataatgcggtcagcgcgattggcgttggcgcggtgtcgccgggagacgcttttatctcgctgggtacctccggcgtgctgtttgtcgtcaccgatcgctatcgtccggcgccgcagtcggcggtgcatgctttctgtcacgtgctgccgaacctgtggcatcagatgagcgtgatgctcagtgccgccagctgtctgcagtggttctgtcgtctgaccggtaccaccgaagtggcgctactggaggagattgcccagttaagcgaagacgaaaaagccaatgcgccatacttcctgccttatctttccggcgagcgtaccccgcataacgatcctctggcgcgcggtatgttctggggaatgacccatgccagcctgcgcgctcaactgggatatgcggtgctggagggagtgagcttcggtattgctgacggcctgcgcgcgttgcaggagagcggaacccgtatcgaccagtgttcactggtcggcggcggcgcccgcagtccgttctgggcgcaactgctggcggatatcctggcgatgccggtggtgacgcataaaggtggggaaaccggcggcgcgctcggagcggcgcggctggcctgcctggcggcgggcaagccgctgaccagcgtttgtcataagccggaaatctggcaaacctggcaggcggatccgcagcgtcatcaggcgctgatgccgcgttacgcccatttccagtctctgtacctcaacgaccgacattttcgacagcaataagacatatgacgctccggcgaaactgccggagtgattctcctgcaccctacaacaacgaggtcaccatgtccgttaatcaccaacagtggctcggtctgccgctgaatcttatctggggatacgtcgccatcgccgtgtttatgaccggcgacggttttgaactcgccttcctctcgcactacatcaaggagctgggcttcagcccggcgcaggcctctttcgccttcaccctctacggcctcgccgccgccctctcggcctgggtctccggcgtggtcgcggaaatcatcacccgcgtaaaaccatgtttatcggtttcgtgctgtggtgcgtgttccacgtcctgttcctcgtcttcggcctcggccgcgccaactacgccttaatcctgctgttttacggtatccgcggcctggcctatccgctgttcctctactcgtttatcgtcgccattatccataacgtccgcagcgacagctccagctcggccctgggctggttctgggcggtctactccgtcggcatcggcgtgttcggcagctatattccgagcttcaccattccgcacattggcgagatgggcaccctgtggctggcgctggcgttctgcgtgaccggcgggctgattgccctggcggcgctgcgtaacaccgaaaccccgcgccatatgcagaatctcaccacccgcgagaagttctccgagctggggcgcgcggtgacccttatctacaccaaccgcagcattatgctctccagcatcgtgcgcattatcaacaccctgtcgctgttcggcttcgcggtggtcatgccgatgatgttcgtcgatgaactcggcttcaccacttccgaatggctgcaggtatgggcggcgttcttcttcaccaccatcttctccaacgtcttctggggcatcgtggcggagaaactgggctggatgaaagtggtgcgctggttcggctgtatcggcatggcgctgtcgagcctggcgttttactacctgccgcagcacttcggccataacttcgccatggcgctggtgccggcaattgcgctggggattttcgttgcggcgttcgtgccgatggcggcggtgttcccggcgctggagccaaatcataaaggggcggcgatttcggtctacaatctgtcggccgggctgtcgaacttcctggcgccggcgattgcggtggtgctgctgccgcacttcagcaccattggcgtggtggtggcctataccgcgctctatatgctggcattttgtctctgcccgtttattcgcgtcgatcagcctggctttgcccgtaaggcaagcggcgtcagggaaggggtagaatattcataacgttgtcagggcgggtatatcccgccctgatgttttaacgcagtagcatacagtccggcggcagacggcagcgtagcgcctcgccgaggatttccatacggaaagatttgccgctcagcggttcgccatccaggttgaaggtcatttcatgggcggcggtgacttcaaaccacggcgatacgccgtcgatcagatttggtgaattatcgggattagcgagagtgctgaacaacgccggtaacagctcttctccggtaaaaatacgcagatgcagtagcccgtcgttaattaatgcttcaggacacagttgctgaccgccaccggcctgacggccattgccgatgccgataaccagcgcgtcgccctgccagtgaaagttctcgccgcgaatttcgcagcggtccggcttcagggtatccatgcgcgtcagaccgtggatcagataggaaacgcctccgagcgcggctttaagtttttccggcgtttcggtggtgatacgggtgccaaagccgccggtggccatattgataaacccggcctcgttgttaacgcgtaccacatcaatagggacatcgcgcccggctatcgccagcttcagcgcgctggctaaatcctgcgggatgccgacgctggtggcgaaatcattggctgtgccgaggggagtaatcccagcgccatgttgctgccgcgctggaccagcgcggtggcgacttcattaattgtgccatcgccgccgccggcaattaccgtcgccaccttgagcgtttcggcttcctcgacaaaacgaatcgcatcgcctttttcccaggtcacgcggacgtgtatctcgatgccttcttcgcgcagaagattaacggcttcgcgcagttgtggctcattcgcgcctttaccgttgagaattaataagctggctggaaattgggtcatcctttatcgcctcattcttagtcgtcatcctcagtgtatcgcatgaatggcgtcatggaataagaaagtcgggaaattggagatgcataaaaaataagcccgcgtaagggagattacgcaggctaaggaggtggttcctggtacagctagcatttatgggttatgtttttcagcgaaatggatgatacctgcttcgaacgtaacggtatgtgatccgattctaatatccatacatagtgaaaaaataacgccaataaactaatttttatgcggattgcgcgtcgactcgccgttgaaattacgcatcagcaaaccatactccagcgccatatcctcaggcagcggcagccagacgatataaccgtctcccggcgcgaccggcattgcttcgcctttggcgttctccatatgttcgagcgtaaaattgacgttgccttgcggagtcattaactccaggctgtcgccgaccgagaacttatttttcaccgccacttcggccagattaccatgacgcttgccggtgaattcgccgacaaactgctggcgttcggaaaccgaatagccgtactcataattctgatagtcgtcgtgggtgtgacggcgcaggaagccttcggtatagccgcggtgggccagaccttccagcgtctccagcagactggtgtcaaacggtttcccggcggcggcgtcgtcaatcgctttacggtacacctgggcggtgcgggcgcagtagtagaaggatttggtacgaccttcaattttcagcgagtgcacgcccatctgggtcaggcgctcaacgtgggcaattgcgcggagatctttggagttcatgatgtaggtgccatgctcgtcctcaaaggcggtcatatactcgcccggacgtttagcttcctcaatcataaatacctggtcggttggcgcgccgataccgagagtcggttcaacgttctgcaccgggataggctcatgcttgtggacgatattacccacatcatcttctttgccttcctggacgttgtactcccagcggcaggcgttggtgcaggtgccctggttaggatcacgtttattgatatagccggagagcaggcagcggccggagtaggccatgcacagcgcgccatgcacgaaaatctcgatttccatttccggcacctggctgcgaatttcggcgatctcgtccagcgacagctcgcgggagaggatcacgcgggtaagccccatttgctgccagaatttcaccgtcgcccagttgacggcgttggcctgtaccgacaggtggatcggcatatcagggaagttttcccgtaccagcatgattaaaccaggatcggacataatcagcgcgtccgggcccatttccactaccggtttgagatcgcgaatgaatgttttcaacttggcgttatgcggcgcgatgttaaccacgacatagaattttttccccagctcatgggcctcattgatgccaagctgcaggttctcgtggttgaattcattgttgcgtacgcgcagtgagtaacgcggctggccggcgtagaccgcatcggcgccataagcgaaagcgtaacgcatatttttcagcgttcccgccggggaaaggagttccggtttaaacatgattttctcgttctgatgacaggtcagactcgccgcaccaggtacggcgattcggggagtgtccccacattaagggcgggcattgtagcgccgtggaaagagggagtaaaccttcgcgcctctctgcgctaagaggcgcgatgatcaagccattctacaggcgtcggcttcccagcgatagccaacgccgtagacggcgcgaataaacgactgctccgcgtccagcgattccagcttacggcgcaggtttttaatatggctgtcgatggtacggtcggtgactacgcgataatcgtcgtacagatgattaagcagttgttcgcgggagaagactttacccggctcctgcgacagcgtttttaatagccgaaactcggcgggggtcaaatccagcattttttcgcgccacgaggcctggaagcgactttcgtcaacaattagcggactttgcgcatccagagcctgcagatcgcgctgtggtttacagcgacgcaggatcgtctttacgcgggccacgacttcacgcgggctgtacggtttgcagatatagtcatcggcgccgatttccagccccagcaggcgatcgatctcctcgattttggcggtgaccatcacaatcggtatctcggaaaatcggcggatctcgcggcacagggtcagaccgtcggtgcccggcagcattaaatccagcaggatcaaatgaggcggcgtctggcggacgtagggcagtacctgatcgccatgcgcaattagcgttggcgcatagctcgcagcttgcaaatagtcgatcaacaactgaccgagtttgggctcgtcttccacgattaaaatgcgcggcgtgttttcatcaataggtaattcgctcatacatccctcgataaatcctgttccagaggtaactctactttaatgctaaccccgccaaaaggcgaatgaccggcgttcaggctgccgccgtgggcggcgacgatattcatacagattgccagcccaagaccggatccaccgctggctcggttgcgggagccctcggtgcgataaaaacgctcgcagagccgcgccagctgctcgtcgctaacgccggggccgctatcggcgaaatcaagcgtcaacatgcgaccattttgtttggcgtcaatctgcaggcggccgccgctgtcggtatagcgcaggctgttttccagcaggttattgaacagctgcatcagacgatcgcgatcgccaaaaacgatagcgttatccggcagcgagacgccgatggtcaagccgcggctggcgaaacgttcgcggaacgcccctgcggcgacctccagcagcgcaattaaatccaccgattctttctggtaggctaatgcgccttcatcggacatcgacaactgatgcagatcgtccaccagtttggtgagcgtgccgacttctgcctgcagcgaagagatcgaatccggagtgaatttacgcaccccgtcctgaatagcttccagctcgccgcgcaggaccgctaacggcgtgcggagttcatgcgaaatatcggccattaaatcgcggcgcatctgttggttacgctcaagcgtactggcaagctggttaaaatcctgcgccagacggcccagttcatccccgccggtgaccgtgacgcgagtggagaaatcgcccgccgccagcttatgggtgccttccaccagtcgtttgaccggcgccagcagcccgcgggccagcgggaaggtggccagcgcggcgaggagggtggcaagggcgacaatcagccaactggtgcgtttttgctggcggtcgaaattgatatccgtgttgcgcgtgagccgctcaaccggcgaggcgatcaccgccccgacggtcacgccgtcgacgacaatgttacggcgggtaccgtcctgcggaaccggcgcccgcgggcctaccagcacgcgctcttgttgatcgacaacccaaaattgcgtgcgccagccgtgtggcggcatatcgggccgcgggccaggcccgggtattggccctggctcgccatgtgggcccggaccacccggcgggcgttcgtcgttatcccgctcgaaggtgcgcagtaactggaagataaaacgatcgttgttgcgcaaaaatttccagtcgccgtgctgctcgtactgttcgctcagcgcgtcgccgagcatcgttaatcgctgttcattaccgcgtttaatatagtcgataaagccccgctcaaagctgatgcgcaccgcccagtgcatgctaatcagcagcacgatacaggtggcgaaaatagccaggaacagcttaccggtgatacccggtcgccaaagtttcacgattcactccttttgcgtcggcggatgacggtgttgctgccgacatcgttcggtacacgggaaaagatgagcgccgggagggcgataatcaccgccatgctcagataggtgtagaggaaaacctgatgaacggctggcgcatcggcgctgatatgctgctggccgtacattccgagcagtagcccggcgatggtcacgccgatactcatcgagagttgcataaccatcgagagcaggctgttaccgctgctggccaactcatcaggcaggttttttagcgtcagagtattcatcgacgagaaacggctggagttaatcatgccctgcaggaacagcaccagcggcagcagccagtaccagccggccagtgcgacggccatgaacagtaaactcaccagcgccaggccgagggttgcgaaaaccagcacgcggcgatagccaaagcgattcactacctgcaccacgatgcgtttcatccccatgctgcccagcaccatggggatcatcatcaacccggcgtggaacggcgagaagccaaggccaatttgcaggaataccggggtcataaacggtaacatcccgctaccgatacgcccggcaaagctgccgccaagaccgagcgagaaggttttattgcgaatcagattgaggctaaacaatgcgttaacgttgccgcgggcgtgccacaaataaaaaattattgccatcaggccaccggcgaccagtacggcgagcagcagcggcgagataccgagccctttattaccgtcgagcgccagcgtcagggcggccattcctgtcgccagcagaataaaaccaaggatatcaaagcgccgggtctgcagggtgtagttcggcatcaggcataatgtggcgattgcgccgatgatgccaaccggaatgttaatcaagaaaatccagtgccaggaagcatattcgaccagtaccccgccaagcgccggaccgagcagcggtccaacctggccgggcagggtgacgaaggtcatcgccgccatatactgatcgcgtggaacgattttcatcaccgtcagacgcccgactggtaccatcatcgcgccgccgacgccctgcagcacccgggacattatcagctgatcgagggtgctggcctgagcgcagaacagcgagccgacggtaaacaacacaatggcgctaaaaaaaatattgcgcacgccaacccggtccgccagccagccgctggccggcagcatgaccgccaccgtaagcacatacgagaccactaccatatgcatgtgcagtgggctctccccgaggcttttggccatcgagggcagggcggtgttgacgatggtggtatccagcgactgcataaaaaagccgaaggccacaatccataactgccagcgtacgctggcgggcagatcggtcatgttattcgcttaccggttgagcagacttgcgcgtaaaacgtagccgcagacgatcaaagaacaaatagaccaccggggtggtatacagcgtcagcagttggctcatgaccaggccgccgacgatggtgatccccaacggctgccgtagttctgacccgtcaccgcccgatagcaccagcggtagcgcgccgaatagcgccgccagggtggtcatcatgatcgggcgaaaacgcagcaggcaggcctggaagatggcttcttcgggcggaagattgccattgcgttgcgcttcaagggcgaaatcgaccatcatgatggcgtttttcttcacgatgccaattaatagcatgatccctatcagggcgattaggctgaatggggcgccgaacaattccagcgccagcagagcgccaacccccgctgacggtagggtggagaggatagttaacggatgcacgtagctttcatagaggatccccagcacgatatacaccgtggcgatggcggcgataatcaggatcacctgtgagttcatcgtctgctggaatacctgcgcggtgccggcaaaggatccacggacgctcgacggcacgccgagctgggtcatcgcccggtcaatggcgtcgctggcttccgacagtgatttgccggtcggcaggttgaaggagatggtcgaggcggccgatagcccctgatgattgaccgaaagcggcgcgttcgccggttgccatttggcgaaatacgacagcggaatgggtttcccgtctttactgatgacaaacatttgttccagcgcgctaacgtcctgggtataaactggatcgacttccatcaccactttgtactggttgagcggctggtagatggtcgagatttgccgctggccgaaagcgttgtttaacaggctgttggcatcctgcacgctgacgcccaggcgtgacatggtgtcccggtcgtagaccagatccatctccgcgccgttatcctgttggtccgagttaacgtcagccagctccggcagcgccgccagtgccttgcggatttttggctcccattcacgcaacgccgacagatcgtccgataacagggtgtattgatagctggcgttcgactgacgtccgccgacgcggatatcctgcaccgccatcaggaacagattagcgccgggctctttcgccagttttttccgcagccggtcgatgatttgctgcgccgtttcgtggcgttggtcgcgcggtttcagggtgataaacatcataccgctattcacccgcgagccgccggtaaaaccggtcacgttatcgaccgccggatcctcgcggatgatcttcataaagtcctgcagtttgccgcgcatcgcctggaacgaaatactctgatccgcctgaatgccgcccatcagcaccccggtgtcctgctccgggaagaaggttttcggaatggcgatatacagccacacgctgagcgccatcgtaccgagcagcaccaggccagtcaggcgactatgcttcagcacccattttaatgatttgccatagccgccctgaatagtgaccagcaggcggccaaagccacgcttgcgcgttggttcatgaggtttgccgcttttcagcagccagccgcacatcattggcgtgagcgtgagcgacacggcgagcgaaataccgatcgctaccgatagcgtgacggcgaactcgcgcagcagacggcccggcaggccgcccatcagcagcagcggtaagaacaccgctactagcgacaggctcatcgacagtacggtaaagccgacttcacgactgccctgtaacgcagcctgcagcggcttcattcccgcctcaagatggcgggaaatattctccagcaccacgatggcgtcatcgacgacgaaaccggtggcgatggtcagcgccattaacgacagattattgaggctgaagccacataaatacatggcggcaaaggtaccgattaacgataccggtacggcgacggccgggataagcgttgcgcgcccggagcgcaaaaacagaaagaccaccagaatcaccagcgcgaccgaaatcaccagcgtttgttcgacctcttccagcgaagcgcggatagtgggcgaacgatcctgggcaatttgtaaatcgatggcggcggggatggtgcgctgcagctccggaaggcgggcgcgaatactatcaaccgtctgaatgatgttggcttccggcagcttgcggatcatcagcaggatcgccggtttggcgttggtcatcccggcgttacgcacatcctgcactgagtccgtcacttttgccacgtcgccaaggcgtaccgccgcgccgttgttgtagtggacgatcaccggcaaatattccgccgcggttttcaattcatcgttggtctgcacttgccagcggtgggtttcatcttccagcgcgccctgcggacgacgtacgttggcgttatcaatggcgctgcgcacggcatccagtgagacgccctggttaaacagcgcctgcgggttaagatcgacgcgcaccgccggcagtgaactgccgccgacgtcgacatcgccgacgccgtcgatctgcgcgatggtttgcgccagctgggttgacgcgaaatcgtacaactcgccctgcgaataggtatccgaggtgagcgtcaggatcatgatcggcgcatcggacgggttagctttgcgatacgtggggcggctgggcatcccgcttggcagcaggctttgcgcggcattaatcgccgcctgcacgtcgcgggcggcgccgttaatatcgcgatcgaaattaaactccatgatgatgcgggtactgccaagcgagctcgacgaggtcatttcattgaccccggcaatgcgccccaatgagcgttccagcggtgttgccaccgatgaggccatggtttccggcgacgcgccgggcagcgaggcgctaatcatgatcaccgggaaatccacctgcggcagcggcgcgaccggcagcaggcggaatccgagaactccgcacagggtgatcgccagcgagataaggatcgtcgccaccgggcgatatatgaagagagcgaaaaacttcacttacgcctcctcttcacggcgcgggaagcggctcttcatatacagcgatagccgatcgaacagcagataaatcaccggcgtggtgaataacgtcagtacctggctgagcatcagaccgccaaccataccaatccccaatgggcggcgtaactcggcgccgacgccggtactaagcatcaagggcagcgcgccaagcagggcggcgagggtagtcatcagaatcggacggaagcgcagcaggcaggcctgatatatggcttcgcgcggcggcattccctgctcgcgctcggcggcgagggcaaagtcaatcatcatgatggcgtttttcttcacgataccaatcagcagaatgatgccgatgatggcaatcacatccaactcgctccctgccagccatagcgccagcagcgccccgacgcctgcggtcggcagggtagaaagaatggtgatgggatgaatgaagctttcgtacagcacgccgaggacgatatacatggcgacgaccgccgcgacgaccagccagacggtgcttccgagcgccgactggaacgcgagcgaactgccctggaactgggtgcggatgtcggctgggaaatccagcgactgctcggctgacaaaatagcctctaccgcttcgccgagggagtagttatccggcacgttgaatgaaatggtggtcaccgggaactgatcgagatggttcactgacagcggggtaaaacgctgctcgacagtggcgatagacttcagcggcacaatgccgccatcgctgctggtgaggcgaatattatccagcgccgccagccccggcgtcgcctgggtgtcgtgctccagtaccacgcgatattggttggcctgggtataaattgtcgagatcagccgttggccaaaggcgttatacagcgcgttatcgacatccgccatggaaatacctagccggctggcgctatcgcgatcgacattaatataagccgcgagccctttatcctgccagtcgctgctgacgtcggcaagctggggtaaggattgcaggcgcgacagcaattgcggcacccagttgcttagcgcatcgagcgagttagcctgcagagtgaactgatactgagttcgactgacggtggtatcgatagtcagatcctgcgttggctggagatagagttcaatacccggtacgctagccaccgattgctgcagacggctgatgaccgtttgcacgcgatcgtcgcgttcatccagtggtttgaggttaatctgcagacgcgcgctgttcagcgccggattggtgccatcaacgccgacgaacgacgtcaggctttcaaccgccggatctttcagaatcaggtcggacacctgctgctggcgttgcgccatactggcgaacgacaccgactgcggggcctgtaacgtgccctgaataatgccgttatcctggattgggaagaagccttttgggataaagacccacagcagaatcgataatgccagggtgcttaacgctacgctcaacgttagccacgggtggttcagtacccggctcagccagcggccatagatggcaatcacccgctcgaagaaacgctcgctggcccgcgaaaagcggttttgtttgcgcagcgattcgtggcttaacatccgcgcgcacatcatcggcgtcagggtcagcgagaccactgctgagataaggatcgctaccgccagggtaatggcgaattcgcggaacaatcgcccaacgatatcacccataaacaacagcgggatcagtacggcaatcagcgagaaggttaatgaaataatcgtgaagccgatttcccccgcgccttttagcgcggcggccagcggtttttcgcccttttcaatgtagcgggagatattttcaataaccacgatggcgtcatcgaccacgaaaccggtggcgatggtcaatgccattagcgtcaggttgttaatcgaaaaatcgaggaacaccatgaccgcgaaggtgccgaccagcgacagcggcacagcgacgccggggatgatagtcgccgggacattgcgtaagaagagataaatgatcatcaccaccagcgcgatggccagcagcaattcgaactgggtatcgctgaccgacgcgcgaatattggtggtgcggtcagaaagcacctgaaccttaacggatttaggcaggctctcggtcagttgcggtagcatctggcggatgctgtcggcggtggcgatgatgttcgctcccggctggcgttggacgttcatcacgatagcccgctgcttattggcccacgcccccagccaggcgttctcggcgccctgttcgatggtagcgacatcgccaagacggatcggcgcgccgttctgataggcgataatcagccgacggtaatcttctgccgactgcatctgatcgttggcggaaagggtgaccgcgcgggccggaccgtcaaggctacctttcgctgaattcacgttggcgttggtaatggcggtacgcacggtttcgctggtcaaacctaacgcggcgatcgcctgggcattgagcttaacgcgcaccgcaggacgctggccgccggctagcgtcaccagaccgacgccggaaacctgagaaatcttctgcgctacccgagtttctaccatatcttcaacctgcgtcatcggcatcgcgctggaggtcacggccagggtcatgatcggcggatccgccgggttaactttgctgtaaaccggcgggttgggtaaatcagacggcagcaggttggtcgcggcgttgatggccgcctgcacttcctgttcggcaacatccaacgccagggtcaactggaactgcagggtaatgaccgacgcgccgcccgagctttgtgaggacatctgcttaaggccggacatctggccaaactggcgctccagcggcgcggtaatcgatgacgtcaccacatccgggctggcgccggggtagagcgtcaccacctgaatggtcgggtagtcaacttccggcagcgccgagaccggcaggaagcgatagccgatgatgccggccagcagaatggcgaccatcaatagcgttgtcgccaccggacgcataataaacagccgggacggaccgcccgtactgcttgggggtaatacttgcatcaggcgcccgctccgtttttaccactctggcgggtggcaggttgttcctgcgcggcgctgtgggcttcgacgacttcgaccttggcgccttcggtcagacggtcgataccatcggtcactacccggtcgcctgctgacagcccggcgttaatcaccactttctggctatcctgaatacccggcgtgaccgtatgtttgctgactttattctcactgttcagcacccacacgaagtgcccctcgttgcccatttgtagcgcggcggtggggatcactaccgcatcctgctcggtatccaccagcattctggcgttgacgaactgattcgggaacagagcgtcatcgaggttattaaagcgcgccttaagcttaatggtgccggtggtggcatcgatttggttatcgaggctcagcaggctgcctgtactgatcttctgtttattggttcggtcccaggcctcgacgctcagcgttttaccggctttctgcgcctgtaccacggtggcgatatcgctttccggcagggtaaagaccaaatcgatagggtgagtttgcgtgagaacgacaatgccggtggtgtcgccactggagatttggttgccgatgtcgacctgcttcaggcccacgcgcccgtcaatcggcgcggtgatgcgggtccagtccagttgcagttgcgcactggcgacggcggcctgatcggctttaaccgtgccggcggattcgaccaccagtgactgctgggtatcgagctcctgacgggagataagattggtttttaccagttgttgatagcgagcgagatcgcggcgcgcgtttgcgagggtagcgttatctttggcaagctggccctgcgcctgggccagcgcgactttgaactggctgggatcgatttgcgccagcagatcgccggcttttacctgctgaccttcctgaaaatggatactcagcaactggccgtcaacccgactgcgcacggtcacggtgttcgccgcggtgatagtccccaggccagtaaggtagcgggggacggattcgctggtggcggttgccgcctgcaccggggccagcgccgcgccgaagcggccatggcgcgccccggcaggcgcttttgctccttgttgacttgcgccagcagcgcctgcggtagtttcttcggagcgatcgtgccagaaccaataggcggctcccgccaccaaaattaccgtcaggaccattccccaacgaagtgtgttactgcttttcattattttgctatctcatccagaagctttcgccgaatgatactagtttagtaacggaacgccccgcaaaaatggaggaaatatgaaaagcgcgtatggaaaggtctgaattggcgggctttcacgaggaggctcgcaaagccgaacgctgaaaagaaatgtgtcagacgcggcatggtaacgtcagtttgatttagcggagtctaaatacaggaaagccctcctgaggaaggggccttaaataaggaaagggttatgatgaacctggtcatcatactggtgatactcttagtgattagcttaccggcttactaagacgccaggggaggagaaatcctcccttacccttcatcctgcaagttaggacgaaaaagcggcaaagtcaactcaggttaccgaatggcgctcgcgtttcaggcgaaaaccacctgcgcccagcgggcaagcccggcggtaacggaaccaaaatcatcgccgccggcgatcggtatcccaggcagctgtgcggccagcgccttcttaattaacggcgatcgcgcgctaccgccggtaagatagataacgtccggtgtttcatggctgctttccagcgctaactttacctgctccataatgcgagccagcggttgattgagcgcctcttccagcccctgctggctgatagcggtagccagctcatcgctaataaacggcagttcggcgttgaaatccggctgagcggaaagggcgattttgctctcttccgcgcagcgcaccagacgatagctcagacgctgacgccagactttaagcagcagtgcgaccttatcggaatcgcgagcgtcgcgcagcaggtcattgagcatgcgcccgttggcggcgctgtaaaaatcactctgcgccgggacgtcgttaatcgccaccgcattccaccagggcagtaccggcagcgcgatacctttttccgtttcaccgcccatgccgagtaacggcatcaggcatttgaaggccagggcgatatccagatcgttaccgccgatacggcagccgctgtggcccagcaggctattctgacggtcggctttctgccgccactgtggccccatcaacagcaacgagcagtcggtggtgccgccgccgatatcgacgaccagcacgcgtttttcgtcattgagcgtggcttcaaaatctaatcccgccgcgacgggttcaaattgaaacacgacatcgttgaagccagcgcgttttgccgcccgctcaagaattccttgcgcctgagcgttagcgtcatcgccgccaagaccctggaagttaatcggtcgaccaatgaccgcctgggttatctgttcgctaagctgagactgcgcctgctgtttaatatgtagcatcatcgcgcagaccagatcttcaaataacgcgacctgctggggtttaagaccattggcgccaagaaatgactttggcgacttaacgaagtagacctcttccggatcgtcaacgtattgatgcagtgaggcaagaccgaactggacgctgttgcccaggacttcgatatcttcatcacggttataattaatggcgcgtcgcaatagcgcctggttttccgcaccgtcggccgggacattatgatggcggtatagccattcgctgaccgcttcgcgcgtcggggcgcaaagcatcgacggcagcaatgggctaccgttttccagcgttaaaagccgtggcgcattgtcctgcatgatagcgaccgaacagttggcggtaccatagtcaaaaccaataaacatgacctgaaaaatccccatgccagtgaagaagggggcgactttagcggattgccgccatgccgacaactggaatttaaaagcaaggcgcatctggctcagagcatctatgcttgttgcgattattaaggagagtgcatgacattattatcctggcgagcgccctatgactggcgatggatgttcacgtttctcagcgcgcgtgcggtggcgggaattgaaaccttccatgaagatgaatatacccgcagcttcagtatcgatgggcacagtggattgattaccgttaagccggatgaacgcagccaggggttccaggttacgctctctcatgggctgttaccggtagcagaccagtgcctggcgcgtgtagcgcaactgtttgatttagcatgcgatccatttgagatcacgcaaaccttaggcaaactggcgcagcctcggccagggttacgcttaccaggggcgctggatgcgtttgaacaggcggtgcgtgcggtgctgggtcaactggtgagtgtagcgatggcggcgaagctgacggcaaaagtggccgcggtctatggagaaacgttaagtgaagcgccaggctatgttatttttcccgaaccgaagaaactagctcaagcggaccctctggcgctcaaggcgttgggtatgccgcttcgccgcgcggaagcattgattcaccttggcaaagcggcattgagcggtgaattgccgttgacggcgcctgccgatatagcaagcggtatgaagcaattgcagaccctgccgggtattggtcgttggacggcgaattactatgcgctacgcggttggcaggcaaaagacatttttttgcccgatgattatctgattaaacagcgttttcctggaatgacgcctgcgcgtatcgcgcgctatgccagccgctggcaaccctggcgctcctatgctttgttgcatatctggtataccgaaggctggacaccggacgaggaataggcgtacagggcgcatatcactggtatcgccgcgctgaaatccctataattgccgcgtttgacggtcaaacgtcaccctccatctacatccaggttaatcaggtcgcaaaaatttatgactgatacgtctcatcagtgcgtcattgtaggcatcgccggcgcatcggcttcgggcaaaagccttatcgccagcacactttatcgtgaattacgtgaacaagttggcgatgagcatattggcgttattccagaagacagctattacaaagatcaaagccatctgtcgatggaagagcgtgtaaaaaccaactatgaccatccgagctcgatggatcatagcttgctgttccagcatttacagacgctgaaaagcggccagccaattgaattacccgtgtatagctacgttgaacatacgcgtatgccggaaactattcatattcaaccgaagaaagtgatcattcttgaagggatcctgctgttgacggatgccagacttcgcaatgaattaaacttttctattttcgtcgataccccgctggatatctgcctgatgcgccgcatcaagcgtgatgttaacgagcgtggccgttccatggactcggtgatggcgcagtatcagaagacggtgcggccaatgttcctgcaatttattgaaccgtccaagcaatatgctgacatcattgtcccgcgcggcggtaaaaaccgtattgccatcgatattctgaaggccaaaatcagtcagttctttgaataacacgtactaattgtgtaacgtgcaaagagaatcccaattgcccttattcccggaaagcgtaagggcgagatgccttaaaggagaaagctcatgcgtctgtgtgaccgagatatagaagcctggttggatgaagggcgtctggcaatcagcccacgtccgccggtagatcgaattaacggcgccaccgttgacgttcgcttaggcaataaattccgtaccttccgcggtcatacggcgccgtttattgacctgagcggcccgaaggcggaagtgagcgcggcgctggaccgggttatgagcgaagagatcgtactgccggaaggcgaggctttctatcttcatcctggagaattagcgctggctgtgacttatgagtcagtaacgcttccggccgacctcgtcggctggcttgatggccgttcgtcactggcgcgccttgggctgatggtacacgtcactgcgcaccgtattgatccgggctggtctggctgcatcgtgctggaattctataattccggcaagctgccgttggcgttgcgcccgggaatgcccattggcgcgctgagctttgagccgctttcgggcccggcggcgcggccatataaccgccgtgaagatgccaaatatcgtgaccagcagggcgcggtggctagtcgaatcgacaaggattgataaagttagcggcttatcgaggatgccatgagacgaattctgaccacgctgatgatcttgttgaccgtcattgtcgcggggctcgctgcgctggtgctgttggtcaaccctaatgacttccgcaactacatggtgcaggaagtggcgcagcgtagcggctatcaactgaaacttgatgggccgctgcgttggcatgtctggccgcagctgagtattctctccggccgtatggcgctgacggcgcctggcgcttccgaaccggtggtacgtgccgataacatgcgactggatgttgcgctgatgccgctactttctcatcaattacaggtgaaacaggtgatgctgaaaggcgcggttattcagcttaccgccaaaacggaagcggtgcgtaaccagaacgcgccggtggtgccgcatgacaatacgttgccgcaggcgccgcaagatcgcggatggtcctatgatgtccgcaaactgcaggtggccgatagcgtcctgttcttccagcatgaaaatggcgaacaagtcaccgtgcgcgacatccgcttacaaatggagcaggatgacaaccacctggcgacggtagatttctccggcagagtcaatcgcgatcaacgtgacctggcgttgtcgtttactgcccaggttcaaggcggtgattaccctcactctttgaaagcggatttttcgcagctcaactggcaggtccgtggggcggagttgccgccggacggcctgagcgggcaaggaagtctgcaggccagctggattgaagaagcgaaaaagctcgatttcgacaatcttcatctcactgctaatgacagcgcaattaccggtaacggtagcgttgtgttgggggataaacctgactgggtgttaaacctgcaggcgaccacgctgaatctggatagtttgcttgcgcaaagcgcggcggccaatgaaggtaatgccgaccagcgtggacaaagtcagccgaggcagctgcgccccgtgattgccgatagcaatatccagcaggattatcatagtttgcttggctttaacggtaagctggcgctgtcggcggaacaggtgcagtggcgaggtatgcgattcagccaggtgaagagtgatatcactaaccagcaggggctgctgacggtgaaacaactgcaggggaatctggggagggacgtctctcgttacctggggtgctggatgtcaggggcaacactgcgcatgccgctttccagccgcaactggataatgtagaaatcggtaccattttgcaggcgtttaactacccgattagcctgacggggaaattatctctgaatggggatttctcgggcggcgcattgatgccgatgacttccgtcgccactggcagggacaggcacagctgcaaatgaaggatacgcgtaccgaagggctcaacttccagcagttagtacagcaggctgtggcgaggagcactaatgtacaggcgcaggaaaacttcgataacgcgacccagcttgacgcattaagtagtgatttaaccctgaacaatggccaaatcacgcttaacggcttgcagggacagtcggcaatgatggcgttgaccgggcaaggtaatctgaatctgcaagcggagaattgcgacatgcatttcaacgtgcgggtgctaggtggctggaaaggcgaaagcaagcttattgaccgtctcaagcagacggcaatcccgctacgtatctatggcaagtggcagtcgctaagctatagcttacaggtagatcagatcctgcgtaagcagttgcaggacgaagccagacagcgtttgaatgagtgggcggaacgcaacagtaatagccagaacggcaaagatgtgaagaagctgctcgataagctgtaatcattaaaccgccgcgagcagctcgcggcggttttgagctaatcaccacataacttcattcacacttcataatctaattcatcttctacttcaactggcgggataatctgtactttctgcaccctgtggctttcaacttccaaagtacgtagggtataaccgccgattttcacttcttcaccagcggcaggaatatgctgcaaatattccatcaataacccggcaatagtgtggtactcacgcttgtcatccagcggtagcggaacgtattgcaccagatcttccagcggcatatggccgttagcggtccaactgccatcggcgtttttgtgaatgtcgtgacgagcatcgatctcttccacttcattaggcagattacccgcaatggtttccataacatcgctgatggtcaccaggccttcaacggagccaaattcgtcaaccacaaatgcaaagtgcgtccgcgcctggcgaaactgctccagcgccgggagcaactgcaaggtttccggaaaaataagcggttggcgtagcagaacgtgtaaatccagcggctcattgcgtaacgactgctgtagcaggtcgataacatgcactacccctaacagatcttcgttatcgttgccgccggtgacgacaatacgggtatgctgatttttctccagcagcgcgcgaacttcctcttcgggcgcgcttaagtcgatgtgctcaatatcatgacgtgaagtcataatgctgctgacggtgcgttgattcagattgaggacgcgctcaatcatcaaccgttcctgtggattgaacaacggactttcgcccaggtctgcgaccatggttgacgtctcggcatcaagctcagcattctctttgcgcccgcttagcaggttcatcacggcttcagtcgtccgctgccgcatcgttagattggctgagaggaaacggcggcgattgaagatggccaactggttgaacgattcgatcatcaccgagaaaccgatggcggcatacagatagcctttcgggattgggaagccaaatccttcggcgatcagactaaaaccgatcatcagcaggaaactaaggcacagaatgacaatcgtggggtggctattgacaaagcgtgtaagagctttgctggccattagcattagcgtaatggcaataatgaccgcggccatcattaccgccagatgatcaaccatacccacagcggtaatgaccgaatccagcgagaagatagcatcgagtacaactatttgcgccaccacgccccagaacttcgcgcctttacgctgggtggggttattactgtcttttccttccagccgctcattaagctcaactgttgctttaaataacaggaacagtccgccgaataacatgatcaaatcgcgggcgctgaagcttaagtcatgccaactgaagagcggtgtggtgagggtgactagccaggaaattgacgccagcagaaccagacgcatcaccattgccaatagcaggccggtaacgcgagcgcgatcgcgctgtgccgggggaagcttttcagcaaggatcgcaataaataccaggttatctatccccagaaccagttcgataaccaccagtgtaatgagaccagcccagatcgagggatcggcaatccattccataatcacttagaacctttacaacataatcgtatgatctatcgatcatggataagcgccaggtaaaatgcaacgatttatcgcggcaacgcgcaccaatctggcatatcaaacgaaagcggtaacgtaattaaccaccgctaaatatcgggtgtttaagatcgatctgggctgatttggaattaattagaaatccctgtaattactgtgcggtaatagagggataaggagagattattaacagcgggtaaagtcaaaatattgtcgtatttttcaccaaaatgttattaaggggaatattcctactgaattccgtagcttgtcaggacctgcgtttaataagacccttaacgtggctcaatgttgcataaaatcagcagtatcagcaatggtcaagggttaaaccacgggtaagaaggttagttagcgaagcttttgtccaaagtttagacgattttgctgattgcgatcgccaaattgctcgttcgcatgggatttgactttttctgtagtggcttaccatggtgatttttaagaaagaaggtgttaaatctgcaaagtaagtagcttatcgccaggaatattggtcaattattattgtttaataacaatggattaagcgtttttcttgctctgtttattcgaaggccgattgaccaggataaacacgtgagaattttcttaaagcgacctgtcagctagcattttttgcgtgtattcttggactaagagagtaatttaggattttggttaaagtcgtgcgcgacacgatgctgtaccatcacaaacaaatgccagtgacatcagcgttctgacaaaaattcgaaagtttataaccatataggtggatgaaataatggtgagtttgaaagcaattattccggtagcagggttagggatgcatatgttgcctgccaccaaagcgataccgaaagagatgctgccgatcgttgataagccgatggttcagtatatcgtcgatgagattgtcgccgccggaatcaaagaaattgtgctggtcacccattcatctaagaatgctgtagaaaaccatttcgatacctcctatgagctggaagcgctactcgagcagcgtgttaagcgtcaactattagccgaagttcaggcgatttgtccgccaggcgtaacgataatgaacgttcgtcagggccagcaactgggcctggggcattctatcctttgtgcgcgcccagccgttggcaataatccgtttgttgtggtgttaccggatatcattcttgatggcgcaagcgccgacccgctgcgttataacctggcggcaatggtcgcgcgtttcaatgaaaccggtcgcagccaggttctggccaaacgaatgcctggcgatctctcagaatattcggtcattcaaaccaaagatggcttgaaagtggaaggggagattggccgtattgttgaatttattgaaaaaccagacgaaccacaaacgctcgactctgacttgatggccgtaggacgttatgtgctgtctgctgatatctgggaagagcttgagcgtactgcacctggtgcctggggtcgtattcaattaacggacgctattgcggcactggcaaagaaacagtctgtcgatgccatgttgatgaccggtgagagctacgactgcggcaaaaaaatgggttacatgcaggcttttgtgagttacggcttacgtaaccacaaagaaggaactaaattccgcgagagcatcaagaagctactggcgtgaaactgagcgcttaatacgagcgcgagctggcgtgcagataacatcaagatgtcgggtgtcgcgccagcgtaacaagatccaactgaaatgagaccgaggttattagcattcggtgcagtaaatgcaatgagattttcatctcagttgaatcttatcaagtatgtggatttgatggcttatcgatgattggcagggcgtgagccgggcatttggtcagatgagttaaaataatgcttagctgatagttgcttagtgtgagctttcttaacgaaatgtacgcaacaaaagctagcgatgcgaaataaaacttgactgagatcatgtttacccattaaacaacggtgatacatgcataaaaacgtaatgttaatggatgaatatgcccatagggagatcatggataagatacagggaaaagggatgtatcgtcagaggatgaagcgtaaatgaactggcaattagtctctttttttggcgatagtaccgtgctgctgcctagcgcagtggtgctgtttgcggtgctggcgctgcgtaaagcatcccggacgctggcctggcaatgggcgttgctttttggcattacgggtactgtcgtatgcatttcaaaactggcatttatgggctggggcatcggcatacgggaaatcgattttaccggtttcagcggacataccgcgctttcgaccgctttttggccaatccttttatggctgttaacctcacgggcgcctttttccgtccgctgtagcgccgtattcgtaggttatgcccttgctgtcatagttggctattcccgtttgatgattcatgcacattcggtatcggaagtcgtgagcggatttatcctcggagcctgcgggagcttgatttttctgctgttgcaatggcgtgcgcattcatcgcgcactgcgcagatctcatggacaggcgtgctgagtatggcaatcattcccctggtgctgttaaacaccggggctaaagcgccaacacaatcgctgctggggaggttgcaaccatgatcggcccatttgacaaaccgttcaccagagccgatctgcataagcatatatattaatcatgcaattcggcaaagctgtacattatcagcctggggtgattggtatgataaaatgccagactgcggacaattaagggataatagaatcgtggctttcataaagatgaaacataataatgttaacagaatacttgaaagcacgaactatcatgatattgcggctaggatgattcttaaatcaaaacggaattttggaaatcagagttatctttctggaacccataaacgaagtgggtaatgatggctatcatattttgtagttgactgctctatagttgtttttttgcattaaacatacggattattttattttctttataatcatgcagttacgtatccatgctgttgcggtggtaatatcatgccggatggggaaagaatccatcaaataatcttattaacggatgaagtcctgccggggaaaatgaaaaatatcatcttaacaggtctttgtggttaaatttatactgccatttgcaggaagaatctcgtaaactcgaggcggtaaaaataatagttgtggttaattaaccaacaacaggacgtaaagaaaattgctggataagaggtacagtgcgttggtagctgttaagccaagggcggtagcgtatccagttccccggtcttcctcgtattgaaaaggcctgagtcaatcagccctacgccgagttacgtcatcgacttctgatcatgtgcacattattgaggccgtgaaagtagccttggcaaccaatatcgcttacattatgaatgcgttaagttcacatccgtttacagcaaaccgctcgtacctgaggatgttgtctatcgaggcaatggatcgctgttgtaaaaaataggcttgtcgaactcataagctcctgattcttaaaaatccccattgccgtacccacctggtgggaagggactcgtaaatggaacttgaacaatgatgaaaattgctcgtatcgtacttgctttgggtctggtcgcttcagttagctcgcaggtatatgcagctggactagtgcaaaatgataatgaacttcgtaacgatctggcttggctttccgatcgtggggtcattcatctcagtctttccacctggccgctcagtcaggaagaaatcacccgagcgttgaaaaaagcaaaaccttcatattcttccgaacaagttgtgctggcgcgtatcaatcaacggctttctaatttgaaggcggattttcgcgttagcggttatacgtcgactgaccaaccaggcatgccacagggctttggccaaagccagccggctgataactcgctctctcttgcttttaataacagcggtgagtggtgggatgtgcatttgcagggcaatgttgaaggcggcgagcgtattagtaacggttcacgttttaatgccaatggcgcatacggcgccgtcaagttctggaatcagtggttatcattcggtcaggtgccgcaatggtgggggccgggttatgaaggcagcctgatccgcggtgatgcggccagacccatgaccggctttttaatgcagcgcgctgaacaagctgctccggagacatggtggctgcgctggattggtccgtggcagtatcagatttccgccagccagatgaaccaatacacggccgtaccgcatgccaagatccttggtggacgtcttactttcacacctttccagtcacttgagcttggcgcttcacgcataatgcagtggggggggaagggcggccagaatcgtttagcagtttctgggatggttttacgggtaaagacaatacttcatcaaatgatccaaatgaaccgggcaaccagcttgcaggttttgatttcaaattcaaacttgagcccactctgggatggccgatcagtttctacggccaaatgattggcgaagatgaatcaggattcttaccttccgcgaatatgtatcttggcggtatcgaaggtcatcatggttggggtaaagatgcggttaactggtactttgaggcccacgatactcgttctaatatgagtcgcaccaattacagttatacccatcacatttataaagatggttattaccagcaaggctatcctctaggcgatgccatgggaggggatgggcagctatatgcaggaaaagttgaattggtgaccgaagataatcaacgttggagcactcgattagtatacgcaaaggttaacccgagggatcagtcgattaataaagctttccctcactccgacacactaaaaggtgttcagctaggctggagcggtgatgtttataagactgttcgtttaaatactaatctttggtacaccgatgctgataatagcgatagggatgatgtaggcgccagcgcaggaatagagattccgtttagtttataaactgaatgctgcgaagtggcttgatacggcagttaatcgtgagatcagggtttaaattgcagctcataaattggcaaatttggtttagtgatgatgtgacattatgaagaaaactattgttagggtttcagcagtggcattggcgattagctttttaacaggttgtactatcgtacctgggcaggggctaaatagtttacgtaaagacgtagttgagttgccggacagcgattatgatatcgacaaactggtcaacgtatatccgttgactccagggttaattgatcaattacgcccggaaagcgtagttgcgcgaccaaatcaacaactcgacaatttactgcaaaattacgaatatcgcatcggtgttggtgatgtgctaatggtgaccgtatgggatcatccggaattgacaactccagcaggtcaataccgtagtgctagcgatactggtaactgggtgaattctgatgggacgatgttctacccttatattggaaaggtgaaggtagcgggtaaaacgctgagtcaggttcgtcaggagataaccagtcgattaactacctatattgaaagtccgcaggttgatgtaagtatcgcagcctttaggtcgcaaaaaacttatgtgactggcgaggtcatgaagtccgggcagcaaccgattactaatattccactgaccgtgatggatgcaattaatgctgctggtggtttagctcctgatgctgattggcgtaatgtaatactgacacataatggtaaagatacaaaaatttcactttatgccttgatgcaaaaaggagatttaactcagaatcatctcctctatccaggagatattctgtttgtcccacgtaacgacgatctcaaagtctttgttatggggaagttggcaaacagagcaccatgaaaatggaccgtagtggtatgactcttgccgaagcattaggtaacgcagagggaatgtcgcaatctcttagtgacgctacaggggtatttgttattcgtcagttgaaaggtgataagcaaggcaaaattgccaatatctatcaactgaacgctcaagatgcgtctgctatggtgctaggtactgaattccagttacagccatatgatatagtttatgttactgccgctccattggtccgttggaatcgcgtaatttctcagctagtaccaacgatcaccggagtgcatgatatgactgaaaccgttagatatattagaacttggccataattatgtttaattcaattcttgttatttgtacaggaaacatttgccgctctcctttaggggagcggtatttgcgagcaatgttaccaaatatgcgcgtagattccgctggaacaggggcccttgtgggccatgccgcagatgagtctgcagccaaaattgctctgataaatgggttaaatttggacggccatcaaggtcgacaactcactgcatcagtggctagagattatgatttaatattagccatggaaaaatcgcatatagagtatgttagtcgaattgcaccagaggcccgcgggaaaacaatgttatttggtcactggttaagtcaaaaagagattcctgatccctatcgaaaaagtgaagaggcatttgtctctgtttattctttaatcgagcaggccggtaaatattgggctgaaaaactgggctcataattattaggaacatatgcatgtcatcagtaagaaataaaacagcggttacagactcagatgaaattgatttaggacgtcttgtcggagaattgatcgatcatcgtaaattaataatttctgtcacatcgctatttacgttattagcattagtctatgctttatttgcgacaccaatttatcaagcagatgcattagtacaagttgagcaaaaacagggtaatgcattgttaaatagcttgagtcaagtattgcccgatagccaaccacagtcggcgcccgaaattgcattgttacggtcacgaatgattttggggaagacagttgatgatctgaatctgcaggcaaaaattgaagaaaatcattttcctatatttgggcgaggcttggctaggttattagggaataaagcaaataatatagcaatatctcgtttatacctttcaattcctggggaagatgttccagaagttgaggtccaggttttagataaaaataaatttagcgtaacaggggaaggaattgagctaacaggaacagtcggtcaactacttgaagcgaaaggtatatcgctgctagtgtctgaaatcgatgcggagccgggaactaccttcactgtttcgtatatttcacgtcttaaggcaattacaaatcttcaggataatttgactattgccgatgaaggaaaagatactggtattttaacgttatctcttaccggcgatgatcaaacacaaatcaagaatatcatagatagcattagtactaactacttagcacaaaatatcgcaagacaggctgcgcaagatgcgaaaagtttagagtttctaagtgagcagttacctaaagttcgcagcgatttggatcttgcagaggataaattaaatggttatcgtcaacaaaaagattcagtcgatctttctcttgaagctaaagctgtactcgatcaaattgttaatgtcgataatcagttaaatgaattaacaatcagggaatccgaagtttctcagctgtttacaaaggagcaccctacctataaagcgttaatggaaaaacgtaaaactcttcaggaggaaaagaacaagctgaataaacgcgtatcagcgatgcctgaaactcagcaagaagtattacgtctaagtcgtgatgttgattctggacgtgccgtgtatatgcaactgctgaatcgacaacaggagctgagtattgcaaaatcaagcgcgatcgggaatgtcagaattattgataatgcgataacgcaacctaagccagtcaaacccaataaagtattaattattctgttgggtatcgtaattgggttactcatttccgtaggcttggtactcgccagagtagttttacgtaaaggaattgagtcgccagagcaactggaagaattagggattaacgtctacgcaagtgttcctgtttcagaagaatttgccaaacgcgtagagcgttctagcaaatggaaaaataagaatcgtgatgaagctgctgtgttcctggcgattgaaaacccagctgatttggctatagaatccattagaggcctacgtacgagcttgcattttgcaatgatggaagccaggaacaatgtattaatgattactggtgcgagtccaaatgctggtaaaacatttattagctcgaatctcgcagaggtaatcgcacagactggaaaaaaagtactatttatagatgcagacttgagaaaaggatatacgcataaattattcaatacagagaataataatggcttatcggacatattgtcaggtaaatcctcaatagagaaagcggtacaaaagatatcaaaaattggcttcgattatatttcaagaggcatggtgccaccaaatccagctgaattactaatgcataagcgttttggagagttgattgcttgggcgaatgaacactatgatttagttgttatggatacaccgccgattctagccgtgacagatgctgctgtgatcggaaattatgcaggaacaactctattagtggcacgctttgaacaaaatactgctaaagaaatagctgtcagtattaaacgatttgaacagagtggtgtgaatattaaaggttgtatacttaatggtgtggttaagaaggcaagtaactattatggatatggttacaaccattacggctatacatataccgataaataaaaattgaattgaaaaataaaccgaagattaatcttcggtttatttctattactgtaattgcctaattcaatattataaacagagcgacaagagtctattgtgaggaagttatgagacttattgttaaaaatatcttggtaagtacaacccttgccttgtcagattttcttgggtttattatttcgccatatctggcgatgtttttcttatctatggttctgagtgattatcagcagatcgttcctcctaaggatatagagggatggctaggattacattggttgctcgggttcggttgtgttgcttggtattcagtacgtctgcgtcattatttttatagaaagaccttttggtttgaacttaaagaaattctgaggacgctggcgatttttgcagttattgaaattgcagtcatggcatttacaacgtggtcgttctcaagatatctatgggtgatgtcttggttattgatatttattcttgtacctttatttagaatggtgactaagaaaatattaaatatgactggtctatggatgcgagatacttggattatcggcaacggaaataatgcttacgaagcttataaagcgataactagtgagcgtaatttgggattgaaaatcgtagggtttgttgaagtgtcaaaacctatggtcacagaaaaatataactttgatgttccaatcattcgggcagatgctgactggctaaataatattgataaaaaaagtcagtttatcgttgcggtagagaccacagagagcgaagaaaggaatatgtggttacgaaatttcatgattaaaggttatcgatatgtctcggttattcctaccttgcgagggatgccgttagatagcaccgatatgtcatttatttttagccatgaagttatgattttccgcgtacaacagaatttagcaaaatggtcctccaggctcagtaagaggttatttgatatatttggagcactgtcgataattattgttctttcaccgctattaatatacatcagtagaaaagtgaaaaacgacggtggtccatcaatttatggacatgagagaatagggaaaggagggaaaccattcaaatgtttgaaattcagatcgatggtaattaattccaaggaggttcttgaacatttattaaatagcgatgctgctgcaaaagaagaatgggataaaacttttaaattaaaaaatgatcctagaataactaaaattggacattttttaagaaaaacaagccttgacgagttaccacaactgttcaatgttctcaagggagagatgagtcttgttgggccgaggccaataatcactgctgaacttgagcgttataatgatgaagtcgattattatttactcagcaaacctggcatgacaggtctgtggcaggtgagtggtcgtagcgatgtagattatgagactcgtgtatacctcgacgcctggtatgttaaaaattggtcaatgtggaatgatatagcgatcttatttaaaactgtaggcgttgttttgaaaaaagatggtgcatattaataagtttcctcgaaccgtagttcattagaggacatgcactgtaaaaaatcttaaggctgaacttgatgacctcatcattaaagaaaactgcagttactggattaatctggagtgcaattgaacgcttctcagtccagggtacacagttcattgttaccattatcctggcaaggctgatatctcctgaagactttggccttattggtatgataactgtgtttattgttttgtcggatcttattatcaatggtgggttctctcaggcactgatccaaaaaaagcatagaacacaggatgattactcaacagttttttactttaacgtattaatcgctatatttatttatggcataatctacttagcagcacccttcgtcgctaagttttacaaccaaatacctttagttgatatattgaggctgcttgcagtatcaatagttttaaagtcattttgtgttgtccagaatgcaattctatccataaagttaaatttcaaattaaggacaaaaataaatctcattagcgcaattttgagtggcgcaatcgctatttttatggcgtataaaggtttaggggtatatgctttaatatatcaaaccattattttttcattgctggtatcaatattctcatttgctttgataagatggttcccatcattaactttttcgttctattctttaacgacacttttcaattttgggtcaaaacttctcttcgctagtgtagttagaaccattgttgataactgttatgcgatcttgattgggcgattcttgtctataagagatgttggatattatactcagggtcggaacttacctgatgtattatctatgaatttgttcaatgtgttacagaatgtattctttccattaatgtctgcacatcaggatgatgagactcggttattaaaaatatataagaaagggattcaaggaactgcttttataattattccagcgatggttggtttgatgcttattgcagacccttttgtccacgccgtactgtcagataaatggaatggtgctatcattgttattcaatggattgctttatcccgtattattataccgattagtgctttaaattgtagtatcataaatgctgtgggtcggtcagatatttatctgaaagttgatttgcttaaattaccacttacgatcggcgctttactggttactttctctttcggtttagaagttatagtcataggtaatgctattgtttccgcaatatgcttctttattaatgcctattacccgggtaaatggtttggctttggtgcttgggaacagttgaagaaaatctcaccgatcgtattttgtacattatgtatggcactgccattatattttatagaaatggataacaagttattagaaatgattgtcaagttaggcatcggtcctgtcatatatagcgctatgtgttatttgatgaaggttgatacttttatggaaatatgtgcattattaaaaaataaaatcaaaaaggaatccgcatgatgaaaatattagcaattaatgaatgctgttcagataatattggtgatcatgcaattaactatggtttggaaaaattaataagaagcaatggttatgaacctcaatctgttggttttgacgcaggtgtgaaaaatgaaaaaccacaacagattattacaaataacaataagttatctttaaagacaagaattaaaaagaaatatctaagtaacaaacagagcctcaagtatgtactatggatactaaaaaatttattacgagtacggtctagtataaagaatgaatatcaggctgtaattataggtggtggtcagttgatacaatcaggggaacattccccatagcaatgtatatctggaccttattctgtaaaatgaaaaaaattccaatttatattgcaggcgtcgggtgtgctgaaaaattttccaagcttgatatttggctatataaaacatcatttgaacgggcttcgaaaatttatgttagggatatatcgtcggttgaaaagctcaaaagaatattttcaacacattcagagctgattcctgacttagcttatgcgctatatgacaaagaaaaatattcttcaaacaaaaaagcacaaacattaattggctgtacttcttattatgtttatgaaaagaatatcaaagaattatcactgaaaaatggcctaaattattcggaatatattagtaagtggcaggatattgcattgtctgagataaatagcggtaaagctatagtgctagcatctacgacggttcaagatgccgtacttaataaattagtttacaacaaactagttgagttgggctattcatcaagcgtatcgcacatagatgatatacctacaacatttgaatatttagctatacttcagaatgttgataaagttatatcaggaaggatgcatagtttaatacttggccatatatctggttgtaaaatagagactatcgatattaataaaaagattgatcattttatgctggagtattcagataagtctccttgtgaactaaatgttaatcttaataataaatttaaaaatataatctaatatattttttgattgtagattaaagtcaggagacacctttggaaaaaatattaatagtaaccaatgaattttatccttttaaaggtggcattgggcgttattgcgaagaacttattactgaaacagctaaggacttcgatgttactctagttgcaccaaaatacgatggaagcttttcgaaaactacgttagccaaacggataactgtcaattatttagatggtggacaatttaagtattggcatctacctggtttaataaaaaaaatactatcaatagatttcagttcttatgaccatgtgttagttgcagattggccattctggattgccatagaaatagtaaataaatatattccatggaagaaaaaaatcaaattctctcttatgcttcatgggagtgaaattctaaacttgaaaaatggaagggcatcaattttccctaaatttttagacatatttgatggcgtggaaaatatttatacaaatagtaactacacaaaagaaatattatataaatgccataacgttccttcgtcgataccagttgaagtcacatatctaggagtttcacaagatgacaatatttctaacgttggatatatagaaaatgttagaaatgaccagtttgagttgttatcggtaggtcggctagatgatagaaaaggatttgataatgtcatcaaagctataggtttattagacgaaggtgtaaaggctaacataaaattcaccatcgttggaaatggcaatgatgagtatatcgagacattaaacacaatagctagaaataatcaggtgaatttaaatattctatctggcctaaatgattctgagctaaatgaatgctataaaaaaaccaatttatttgttttagctgctcgtaataataataaaaaaattgaaggttttggtctcgtttttttagaggcggctaagtttggtgtgccttccattgcaactgatgttggggcaatcaaagaggttgtcaaagatcatgaaaccgggttcgttgttaaagaagatattcatgagttaaagaaagccatatacaattgctatgttgacaggaatatattaattaatttcagtaataactgtatcgtcaatgtgaaaaaatttaagtggtcaacactggcaacaaaaacttttcctaaagcttatggaaataaaaatggaagaaattaaagtattatatgtagatacctgtctggatgtcgcaggcggtcagcgttcattaattgccttgttagtaaacatgtccgagagaataaatttctcagtacttattgatgagactaataaaaaatatgagcaagaacttctcaaggctggcattagcaatgaaaaaatcattaaagtaaaaacatgtacagttggtgggcgggcgttaggaggagttaaattgttcacaacggtgttgcaagaggcaagtagattccatattgtccattgtaatactttctatgatggtctttttgcaatgcctgctgcaagattacgtgggaaaagaacaatattccgagccagatgcgggattgaactatcaaatcacggcataatcgataatgtcatttatcagttttcaacaaagattttagccaactcagactatgttaaaagtacttttagtagggtttctaaagatctaagcaaggttatttcgttatataatcctttggatatgaagtttaaacgagatattgctgtctgcaatgctagccccaaaggtgatcttgacaggaattatgttattgctgtgatcggcgctattactgaagtcaaaaatcaaatggaagtgcttagagccttttctaaacttaaagatgcatcactaaaattgaaattcataggtgagccaagaagcactgaaaaagataagcaatactataacgaactattaaaatatgcggaagacaataatcttgcttctcaagtcatatttactggttttgtttcagatgtgagagagaagcttaatgatgtagatttagtctgcgttccgtcagatcgggaaccacttggtcgagttatctttgaaagccagttatatggtattcctgtattagcttctgactctggtggaaactcagaattaattgagaatggagttaccggatatttatactctttaggtgatatagacgagctcgctatgaaactcttagtggcaaaagaaaataactacaaactcgctattaatgccaagaatttgtattgcagcgattttcaccagaacgaacgtatcttgaagagcttaatctttatagctcaattaaataagtgacaggatgaaaacatacatggaagtattattttatatgtttaataatattattagtttagaattttaatgtgatatattcttgttggatttagtaaaggcgcgccatgactatttctattaaaaagttaaatttagactatgcaatgataatcgctttcattgtcatcgtgttacctcaggtaatactaaagccaattggtggcgatttgtctattgtagatataggcgcccccatggtaatagcttattgcatatttcgccatcgacttaagttgcctccccgcagaagtatctcttgatttttatattttatttactggtgtcattcctgacaatgatgttgtttggcgggatagaatatcaagaatcaagtccctatttaataagaatggtttctttatatgctccggtttttcttgtgccatatttaagtgatgatgaaactcagtttgttaagttcggtaaagtatttgtagttatatcgttaatagctacagttgttatcattgcattatatatttcaggttggactggcgtcagtgcgcatcagacgacggaaagtgacgatggtttgacggttaatcgattaggaggtttgcctggtgaatcggggcctttgcatataatattttatttgtattttatatgtcgcttatcgtatatcttgttgcggaaagaaaatggataaagaaaatagtcatgtttggtggcactctcattgtgctatttttatcatttaaatacagtcttgcacgagtaattgtaatttgtgctggagccgtgattctatgcggctattttttcacatcgatatctattgtaaaaaaatactttctctttctttttacatttctagtatgcagtacttctttgttctttgtttcacctgattcacttgatttatcgaaatatagattgtcgaacgttgcaagtactgatatgaattctgtttcatcaggccgggtttcacattggatagatgctgtagccttatatgtagaaagtcctttcaatgttgtttttggagtaggacatcgtatgtccgtacgattccttggtcatgcggtagagaacttttttatccagaacctccttgattatggcattgtaggcactattctatttgttattttcttatggtttctactcaaacctattatcaaaaatgcaaaaacaaaaaatggaatttcagttgcaattttgttagtttttacaggtatctttttacaatggcaatttaatgatatcaatacatattatcaaacatacccagctactttattcttcttaagttggtggagtcaaatttgtcgaaaacggaacgctgccgttgacaatatttaatttaaaattatatgtggatcttctgaaggtgatggacttatgattactcctgttattatggccggtggtactggtagtcgcttatggcctatgtcaagagagctatacccaaaacaatttttaaaactctgtggttcaaactctatgctgcaagaaacaatcgtcagattagaggggcttgatgtaagtcatccggtattaatttgcaatgaacaacacagatttttagctgctgaacagttaaggcagattaactgtttatcaggcgacataattctcgaaccagttggtagaaatacagctcctgcgattgccttggctgcacttaaatctattgataaagacaatgatcctttgctgcttatattggctgcagatcatattattaatgatacatcaacgtttcatatagctgtaaataaggctattccccatgccaggaatggtaagttagttacatttggaattgtccctacagggccggaaacaggttatggctatatacagcgtggcgctcatttaactaatgataaacaagcttttgatgtaaagcgatttgttgaaaaacctgatttaaacactgctaatgagtatgtttcaagtggtgaatattactggaatagcggtatgttcctgtttagtgcccggaaatatttagaggaacttgggaaattccgtcctgatatcttaaattcttgcattgatgcgttttcagtagttgaaaaagatgttatgcaagattttatcagaatagatgctgagagatttacagtttgtccagatgaatccattgattatgcagttatggagaaaacagacgaggctgtggtaattcctttggacgctggttggaatgatgtcggttcatggtcagcactctgggatgttaatattaaaaacattgataacaatgccttgattggcgatgtttttacgcataatactagtaattgttatattaatactgatgaaaaacttgttgctgcaattggcgttgataatctggtcatagtcaatacaaaagacgccaccttggtcattaacaaagataaagtgcaggatgtaaaaaaagtagtcgaatttttaaaaaaggatgaccgtcgcgagtatagaatacatcgtgaatcataccgaccatggggtgtgcaggataaagtcgttgatactcctcgttaccatgttaataaagtgactgttaaaccgggcggaaaattttcattacaaaagcatattcatcgtgctgaacactgggtggtattgtcaggtactgctgaagttactcttgatgaacaaacatatttattaactgaaaaccaatcaacttttattccggttggtaaaactcatatgcttcataatccaggtaagattccgcttgtcatacttgaaatagtctcaggggcatacttaggcgatgacgatattatccgcttgaaagatcattatggccatttttgaatagggaataagaaagtgacaaacaaattatcttgttttaaagcctatgatattcgtgggaaacttggctctgaattaaatgaagacattgcttaccgtatcgggcgagcatttggcgagtatttaaagcccaaggaagtggtcctcggggggatgtccgacttaccagtgaaagtttaaaacttgcactggcacaggggttgcaggatgctagtgttgatgtcatcgacattggtcttgctgggactgaggagatatatttcgctaccagtcatttagaagttgacggtggtattgaagttactgcgagccataatcctcttgattataatgggatgaaactggtcagggagtcttcgaaaccaattagcggtgatacaggccttcgacatatccaaatacttgcggaagaaaattcttttaaacctgtattatctgattgccgtgggagttacaagaagatatcgattcaagaggcgtatatagataaaatattatcttatatagatttttcgaatttttcaagaccgctcaaattggtattcaattctgggaatggcgcagctggtcatgtaattgacgcgatcgaagaaagattcaaaaataataatttgcctattgatgttatcaaaatacatcaccatcccgatggtaatttccctaatggcattccgaatcctctattacctgaatgtaggcaggatacaattgatgcagtaattgcacatcaagccgatatgggtatagcttttgacggggatttcgataggtgtttcttgtttgacgaaaaaggcaactttatcgaaggatactatattgttggcttattagctcaagcgtttttggaaaaaaaaccaggttcaaaaataattcatgatcctcgtcttagttggaatactattgatttagtttcacaatctggtggtgttcccgttatgtcgaaaactggccatgcgtttatcaaagaacgcatgcgtctcgaagatgctatttatggtggtgaaatgagtgctcaccattattttcgtgatttcttctactgtgacagtggaatgattccttggttattagttgcagaattgctgtgtaacaaaaacaaaagtttaagccaactagtcagtgatagaatgatagcgtatccagcatcaggagaaattaatagttcaattgaaaatcctgcaatggctattgagagagtgctagaacattataagcttgatgctataaatatagataatactgatggcattagcatcgagtatcctgattggcgtttcaatctccgtagttcaaatactgaaccagtcgtacgtttgaatgtcgaatcaagaggggacagggatttgatggttcaaaagaccaatgaaattctgactatattaagagcttaatatttatagtgagcagatattttctgctcactttttctatttttttacagcttgggtgttaaaatgtcagatgatattaatatcggtattgtagctgattggttagttacatatgcgggttctgaaaaggttattaaagaattcattgacgtatttccttcatcagaattatattcagttgttgattttttgtcagattcaaatagggaactattttcagggaaaaaggcaaaaaccacttttatacaaaaaatgcctttcgcaaaatccaaataccaaaaatatttacctttgatgccattggcaatcgaacaactcgatatgtcaggtcatgatgtagttttatctagtagccatgctgttgcaaaaggcatcttgactgggcctgatcaattgcatataagttacgttcattcgccaattcgttatgcttgggatttacagcatcaatatcttagagagtctggtctgtctgaaggtttgaagggatttattgcaaagtatttactgcataaaattagaatttgggattatcgtacagcgaatggtgttgatcattttattgcaaattcaaaatttatttcaagacgcattcataaggtatacggacgctcctctgatgtcatatatccacctgtagatgtaaataacttcacccttaatgaaaacaaagacaactattactttacagcatcgagattagtgccctataagagaatcgatctcattgttgatgcattcaatgaaatgcctgaaaagaaactggttgtagtaggtgatggctcagagatggataagataaagtccaaagccaaaggaaatattgaaattcttggttaccaaccgaacaatataatgcaaaagcatatgcaaaatgctaaggcctttgttttcgctgctgaagaagactttgggattacacctgttgaggcccaggcatgtggtacaccagtcattgcttttggaaaaggtggggtgctagaaacgattattcctgaaggtaatcagaatcctacgggagttttttttgataagcaggaaccagggtcaattatagaaagtgtaaataaatttgaaagcatgcaagacctttttgaaccaattgagtgtaggcgtaatgctgaaaaattttctgaagaaagattcaggactgaaattaataaatatattcgagataaatggactaaatttaatgaagctaagtagtttctggtattgttaacttaatcttgttggcaataccttgtctagaactgtttgattataaaggccagattatgccatcactttcaaagcataaaacgtatccttatttattgttgcttctagctgcatgcaatatttctaatgctagtgcatttgaatttggtatcggtacccatatagcaaactataaagaaagttctgatttttatatcaataaagttaaatcatatggttttaactcagttcgtgatgaattgtattggaatgatcttgagaagcaagatggcgtttttagcattccagaaaaccgaactaaaaccgatcactacttccaaaaattacagtcaaataatgttagtgctttactcgttttggattatggtaataatctccatacaaaaggtggatttcctgctaacgatcagcagatagagaagtttgcttcttatgctgcttgggtagctaatcgttataaaggaaaagttcgctactatgaagtttggaatgagtggtatcttggtactggtattagttcttggtttttaaaaaaagcaaagcctgatgatacaacctactttaaattaataaaagctacttcggaagcgattaaacgtattgaccctgatgcaaaagtaatcgccggaagctttaatcctttgaaaactcaagaagttacatggtttgatcatattattgacctgggagtactgcaatatattgatggcatttcagtgcatgcgtactcatatggtaataaaaatgccgagttgagaacacctgaagggaatttagctgctcttgatcgctatgataaacacattaaaagtaagactggtaaggatattgacctctatattactgaagttggttatcccactaacaaaaaaagcggtggggttgaccctattgttgctgcccaatatatgatcaaatacactcttcttgctaaggaaagagattacattaagggcatatggtggtatacccttatgaatagtgctgataatagctccaatcgtgaatctaatttcggtattcttatgcataatgaatctgaaaaagcttcggctaaatgtcttaaacttaatgagttacctattgctgcagctctgaccaataaattcagtaaatcctctcctattagctgtgatgggcaataaagcacctatctagcacaatttcaactaccagaaaatttaggtatgccgtactatatagggatacttaatctgtgaattatcacagttaacacaccagacaggagtatgtaatgtccaagcaacagatcggggttgtcggtatggctgtgatgggccgcaatctcgcgctcaatattgaaagtcgcggctacaccgtctccgtattcaaccgctcccgtgaaaaaactgaagaggtgattgcagagaatcccggcaaaaaactggttccttattatacagttaaagactttgttgaatctcttgaaacgccacgccgcatcctgttgatggtaaaggctggtgctggcaccgatagcgctatcgactctcttaagccttaccttgaaaaaggtgacatcatcattgatggtggcaatactttcttccaggatactattcgtcgcaatcgcgaactttctgcatcaggttttaatttcatcggtacaggcgtatctggtggtgaggaaggggcgctgaaaggtccatcaatcatgcctggtgggcaaaaagaagcttatcaactcgttgctccaatcctggaacagattgctgctcgtgcggatgacggtgaaccctgtgtggcatacattggtgctgatggcgcaggccattacgtaaaaatggtccataacggcattgagtatggtgatatgcaactcattgctgaagcctatgctctgctgaaaggtgggcttgcgctttccaacgacgagttggcggacactttcaccgagtggaatgaaggagagcttagtagctatctaatcgatataaccaaagatatcttcactaagaaagatgaagatggtaagtatcttattgatgtaattcttgatgaagcggccaataaaggtaccggaaagtggaccagtcagagttcgttggacttgggtgagccattgtcgttgattacagaatcagtttttgctcgctatatttcttcgctgaaggaccagcgtgttgcagcttcaaaagttctaacaggtcctcacgttaaatcagcagaaaataaagtagaatttatagagaaggttcgtcgagctctgtatttgggtaaaatcgtctcatatgctcaaggtttctctcaattacgcgcagcatcaaatgaatatcactgggatctgaattatggagaaattgctaaaatcttccgcgctggttgcatcatccgggctcaattcctgcaaaaaataactgatgcatatgaacagaatgcaaaaattgcgaacttacttttagccccttacttcaagcaagttgccgatgaatatcaacaagctctacgcgatgtagttgcgtacgcagtgcaaaatggtatccctgtaccaacattctctgcggccattgcttattacgatagttatcgttctgaagttctgccggctaatttgattcaagcccagcgtgattattttggcgctcatacctataagcgtatagacaaggatggtatcttccacactgagtggttagattaatccgatttatttaaaaagataaaactcatagacctatctggtgagtttgaaatttcctcttcaagacactaatgttaaagttagtgtcttttccatttaagcatctataagcctcttttaagcgcctaagctgaatccttgactttttataaggctcggagtaaaaacgccaaagatgttgattaataggacggccttcacgccgttgttcagttaactgattaaagtgtaatctaatgaaaattactatttcaggtacaggctatgttgggttatcgaatggtgttctgattgcccagcaccatgaagtggttgcgctggatattgtacaagcaaaagttgacatgcttaatcagaagatatcacctatcgtagataaagaaatacaggaatatctgaaggataaaaagcttaattttcgggctacaactgataagcacgatgcttaccgagatgcggattttgtaattattgcgacaccgactgattacgatccaaaaacaaattactttaatacgtctacggtcgaaactgttattcgtgatgttactcaaatcaatccggatgcagtcatgatcatcaagtcaacgattccggtgggcttcactcgagatattaaggcacgtttgggtattgataacgtcattttctcacccgaatttctccgcgaaggccgcgcattatatgacaatcttcatccgtcccgtattgttattggcgagcgttctgagcgtgcagaaatttttgccaacctactgaaagaaggtgcaatcaaacaggacatccctacgttgtttactgattcaacggaagctgaagcgatcaaattatttgctaacacttatcttgctttacgagtagcatattttaacgagcttgatagttatgctgaaagccagggccttaatagtaagcaaatcattgaaggggtctgtttggacccgcgcattggcaaccattataataatccttcatttggttatggggttattgcttaccaaaagatacaaaacaacttcttgcaaactatgaatcagtaccaaataatataatctcagcaatcgttgatgcgaatagaacacgaaaagattttatcgcggactctattttagctcgcaaacctaaagtcgttggcgtgtatcgtcttataatgaagagtggttcagataatttccgtgcttcctctattcaagggattatgaagcggattaaagctaagggaattcctgttattatatatgaaccagtgatgaaagaagaggaattcttcaattctaaagttgtgagggatttagatgcattcaaaaagaatctgatgtgattatttctaatcgcatggcggatgaactttatgatgtttccgaaaaagtttatacgcgcgatctttttggtaatgattgataggttttcatggctggttttattattgccagccaattgttttttctttcattatttttgtgatttctcgtaactttatatgtaaaagtaattgtactatttgtgtcttatattgttggtacaataaatgaggttgaattatgaaatatttagtgactggtgccggcggatttatcggatttcatgttagtcaacgtcttttaaaagatggccatcatgttgtagggattgataatcttaacgattattacgatgtaagtctcaagcaagcacgtttgaatctcttacaatcttctttgttcacttttcataaaatggatcttgccgatcgtgctcaaatggaacagctttttgtttctgaaaaatttgatcgcgttattcaccttgctgctcaagcaggcgtccgttattctcttgaaaatcctcatgcttatgcagactcaaacctcatgggcttcttgaatgttctagaaggttgtcggcataataaggttcagcatctgatctatgcgtcgtcaagttctgtttatggattgaaccgtaaaatgccattctcgaccaatgattcagttgatcatcctgtatcactctatgcggcaacaaagaaagccaatgaattgatggctcatacctacgcacatctctacgggattccgactactggtcttcgtttctttacagtttatgggccatggggccgtccagacatggcgttatttaaatttactaaggctatgttggaaggagacagtattgatgtttacaatcatggtaggatgaaacgcgacttcacttatattgatgatattgttgaggctattattcgtttgcagaatgtcgttccacaggctgaccctgactggactgttgagagaggttctcctgcgacaagctctgcaccatatcgcgtttataatattggtaatagttcaccagttgaattaatggactatattacagcactggaagatgctttaggtatggatgctaagaaaaatatgatgccgatgcaacctggcgatgttatggaaacaagtgctgatactgccgatttatataatacgattgactttaaaccagagactacagtgcgtcaaggcgttgaaaattttgtgtgctggtataagcaatattatcaatattgatgtttttttttgctttcacctcgcctgttttacttagcatcgagtaattgtgaacataatataggtgatcgcttatgtggtcaccttactgtatgttaaaatagtgattcttttcgttagctttgaattaccttgctctatttttttatatgtcatttagttccttgcaaattttcacctgtaccaagttatctatcaggtacatttgatactatacccatccgttcttgatattccgatagaattctcccggagtcatgtctttcaatcatgattatccttcacatgattatatattctacctcagtggtcgagtctgttctgtgtatattcagactatagggaccagggcatagtcagaattacaaccggaagatcactgttaaatttatcaatggggagcaggtcagcggcagaacgcaatcgcgacgatgtcttcttatgccattaatccagccttcataagataaacttgccctctcaaccatgtaatgtacatatctttatacgctcaccctgcaccaatagtgttcccaacatcctcatccttcacttctttcctttatagatcgccggtattctcgactaaattatccattatagttaggccgtctgtttaaaagactgtttgacagaaaatcctactgaatacttatcgatgcgtgtcaagtttggagtttggtgacagcgttatgtactaataagttgtcctgattctctccttgtagcctgcaaaaccggtgtgttttccggttgccttcgtttcctcggaggtcatgaatgtgcagacaaccgtagggtacacactctgtcggtgctttcacgatatgtttcctgtttaaaatgtcccatctgaccgactccttactaatttcataattttgactgtaatacctccggtcacatcttcgtatgcctacttagctagccgcaagcatctatcatcgacgattttcatccttcggcttgttgtaattcctggagttcagtcacgcgcagttgtaaaaagctgcctcagaggaccttcctcgtgtaactgtcgcatcgtggggtcttacatcttgtccatgggagttacacaattgtttctactttgtattgattgcgaagataaactacaaaaacatctttatctaacgcttcgttatcaaataataaggtgacagattgtaaaatgtttaacgatttgtttgcatgaattataggagtcaatacctgccgtaccataccagaggtcttgcctaagccaaacctttttaaatggttatatttaaaccaaatcagactggctctgcatatctttttctttgaatatcagttggttggttgcatttttgtttgcagctatcatgtttcattcgagtaaactcttaatcggtaggcttttttatttttattctatgcgtccagcgctataatctgctgacgtttttttggggaagtgtagcgcagaggcatgtttcgtttatctcactttttagatcatagtgcagtgctagtgcgacaggaaatactaaccagagtcagtgtcgtcttttccgttgcaaaaacatggtatacctcttcttggttcatcttgtaactcttcttctcgatggtatgtgagcaactatgtattcctttacacatcgatgataaccaggcgtgccttagactgattaaatgagacaaacccgatggttgcaccctctgtaaatgcggaaagtatgcgttgttttctttctgatgagtacgcgatagatgcaaaggatagagatatgctttcaggcatatctctgtttttaggtttttagaggattcttatccgtagaaaccatcttttgtcgcttccttaatgacaccttttgccagaagcgtttgagacctacatagagctagcactgatgtattacgcattttggttgcgatagccaatggcggtagcgtgctttaacaaaaggtttgtttttaacggttgattaatagtaaaagtttttttatttaaggatttcaatatgttacttcctgtagttatggctggtggtaccggcagtcgtctctggccgatgtcccgcgagctttatccgaaacagtttctccgcctgtttgggcagaactctatgttgcaggaaacgatcacccgactttcgggccttgaaatccatgaaccgatggtcatctgtaacgaagagcaccgctttctggtggccgaacagttgcgtcagctcaacaagctgtcgaacaacattattctcgagccggtcggccgcaacaccgccccggccatcgccctggcggcccttcaggccacccggcatggcgaggacccgctgatgctggtgctcgccgccgaccatatcatcaataaccagccggtcttccacgacgccattcgcgtcgccgagcagtatgccgatgcaggccatctggtcaccttcggtatcgtgccgaacgccccggaaaccggttacggctacatccagcgcggcgtggcgctctccgacagcgcccacaccccgtaccaggtggcccgttttgttgagaaaccggatcgtgagcgtgctgaagcctacctcgcctccggggagtactactggaacagcggcatgtttatgttccgcgccaaaaaatatctctccgagctggccaaattccgcccggatatcctggaagcctgccaggccgcggtgaatgccgccgataacggcagtgacttcatcagtatcccgcatgacattttctgcgagtgcccggacgagtccgtggactacgcggtgatggagaaaaccgccgacgcggtggtggtcggtctcgatgccgactggagcgacgtcggctcctggtccgccctgtgggaggtcagcccgaaagacgagcagggcaatgtcctcagcggcgacgcatgggtgcataacagcgaaaactgctacatcaacagcgacgagaagctggtggcggccattggcgtggagaacctggtgattgtcagcaccaaggacgcggtgctggtgatgaaccgcgagcgttcccaggatgtgaagaaggcggtcgagttcctcaagcagaaccagcgcagcgagtataagcgtcaccgcgagatttaccgcccctggggccgctgtgacgtggtggtccagactccgcgcttcaacgtcaaccgcatcaccgttaaaccgggaggcgccttctcgatgcagatgcatcaccatcgcgccgagcactgggtgatcctcgccggtaccgggcaggtgacggttaacggcaagcagttcctgctgaccgagaaccagtccacctttattcccattggcgctgagcacagtctggaaaatccgggccgtattccactggaagtgctggagatccagtcggggtcttacctcggcgaggacgacattattcgtattaaagaccagtatggtcgttgctaatttttttcgggataaaacgcagaatgacacagttaacatgctttaaggcttatgacatccgtggtgaactgggcgaagagctgaacgaggatatcgcctaccgtatcggccgcgcctacggcgaatttctgaaacccgggaagatagtggtgggggggatgtgcgcctcaccagcgagtcactgaagctggcgctggcccgagggctgatggacgccggcaccgacgtgctggatatcggcctgagcggtaccgaagagatctactttgccaccttccacctcggggtggacggcggtatcgaggtgacggcgagccacaacccgatgaactacaacggcatgaaactggtgcgcgagaacgcgaagcccatcagcggcgataccgggctgcgcgatattcagcgcctggcggaggaaaaccagttcccgccggtggacccggcacgtcgcgggaccctgcgccagatttcggtgctgaaggagtacgttgaccacctgatgggctacgtggacctggcgaacttcacccgtccgctgaagctggtggttaactccggcaacggggcggcggggcatgtgattgatgaggtggagaaacgcttcgcggcggccggggcgccggtgacctttatcaaggtgcatcaccagccggacggccatttcccgaacggtatcccgaacccgctgctgccggagtgccgtcaggacaccgccgacgcggtgcgcgcgcatcaggcggatatggggattgcctttgacggcgacttcgaccgctgcttcctgttcgatgacgaggcgtcgtttattgaggggtactacattgtcggcctgcttgcggaagcgttcctgcagaagcagccgggggcgaaaatcattcacgacccgcgactgacgtggaacacggtggacatcgtgacccgcagcggcggccagccggtgatgtcgaagaccgggcatgcgttcatcaaagagcggatgcgccaggaagacgccatctacggcggtgagatgagtgcgcaccactacttccgcgacttcgcctactgcgacagcgggatgatcccgtggctgctggtggcggagctgctgtgcctgaagaacagttcgctgaaatcgctggtggcggaccgccaggcggcgttcccggcgtcgggagagatcaaccgcaaactggggaatgcggcggaagcgattgcccgcatccgggcgcagtatgaaccggcggccatcgacatcgacacaacggatgggatcagtattgaatatcctgagtggcgctttaacctgcgcacgtccaacacggagccggtggtgcgtctgaacgttgagtccagagcggatactgcgttaatgaatgagaaaacgaccgagctgctcaacctgttaaaagaggaatcgctttgagtcctatgttttcagcgatctatcgctaccgtggttttattattgacagcgttaagcgggactttcagtcccgttaccagaccagctttttaggcgcggcatggctgattttacaaccgatcgctatgatttccgtctatacattaatcttttctgagttaatgcgtgcccgcctggcgggaatggacggcccttttgcctacagtatctacctatgttccggggtgttaacctgggggctgtttactgaaacgctcaacagtctggtcaacgtttttctgactaacgccaacattcttaaaaagctcagctttccgcggatctgtttaccgatcatcgtcaccgcttcggcgttcattaactttctgatcattttcggtctgtttgtgctgtttctgatcgtcacgggcaatttcccgggcatgattttctttgaaatcattccggtgctgatcgtccagatgttgttcactctgggcctgggcattatcctcggggtgctgaacgtttttgtccgcgacatcgggcagttcgtcaatatcctgctgcagttttggttctggtttacgcctattgtctatgtgtccaaaacgttaccggaatgggtatcaggtctgctggcgtataacccgatggcgactattatcggttcctaccagaacgtgatgctctatcaccagagccctaactggatggcgctgcttcctgtcacggtggtgtcggtcattctgtttttatttgcctggcgtttatttaaaaaacatgccgctgatattgtggacgagatttaatcatgagtatcaaagttcagcacgtcggcaaggcgtataaatattacccatccaaatggaaccgggttattgagaaattactgccgggcgataagccgcgtcacagcaagaagtgggtattaaaggatatcaatttcagcattgaacccggtgaagcagtcggcattgtgggggtgaacggcgcaggtaaaagtacgttgctaaagctgctgaccggcaccactcaacccaccaaagggagcattgagatccaggggcgcgtcgccgcgctgctggagctgggcatggggtttcatcccgactttaccggccggcagaacgtgtatatgtccgggctgatgatgggcctgagtcgggaagagatcgaacgcttaatgccggagatcgaagccttcgccgatatcggcgactacattgaagagcccgtgcgcatctattccagcggcatgcaaatgcgcctggcgttcgccgtcgccacagcctcccggccggatattctgatcgtcgatgaagcgctctccgttggtgactcccgttttcaggcgaaatgctatgctcgcatcgcggacttcaaaaagcagggtaccacgctgctgctggtttcccatagcgccggggatatcgttaagcactgcgatcgcgccattttcctcaaaaatggtgacatttgcatggacggtaccgcccgtgacgtgaccaaccgttatctggatgagctatttggcaaacctggtaaagacagcgcgacgaaaagtgaaacggctacctcgtcagccagtggcgaaagccagatgtcgctcgatgagattgaagatgtgtaccacacgcgtccaggctaccgtccggaagaatatcgctggggcagggtggcgcgaaaatcatcgattaccatatccagagcgccggggttgattttccgccctcgctgacgggtaatcagcagaccgattttctgatgaaagtcgtgtttgaatacgattttgattgcgtggtgcctggcatcctgattaagaccctcgatggcttattcctctacggaaccaactccttcctcgcctctgaagggcgggagaatatttcggtttcccgcggtgatgttcgggtctttaaatttagccttccggtggatttaaacagtggcgattacctgctgtcatttggtatctctgccggcaacccgcagacggatatgacgccgctggacagacgttacgactccattattttacatgtgactaagagcatggatttctggggtgtcatcgatcttaagtcgtcctttactagctaccaatgacgttgagaaaaacgattccatgactaaaaacttaaacacgctggttagcgaattacctgagatttatcaaactatttttggccatcccgagtgggatggcgacgccgctcgcgattgtaatcaacgtctcgatttgattaccgaacagtacgataacttatccagcgcgctggggcgcccgcttaaagttctcgatctgggctgtgctcagggcttttttagcctgagtttggcaagtaaaggcgcgactatcgttggtatcgatttccagcaggaaaatattaacgtgtgccgcgcgctggccgaagagaaccccgatttcgccgccgagtttcgggtaggcagaattgaagaggtgatcgccgcgctggaagagggtgagtttgatctagccattggcttaagcgtgtttcaccatattgttcatcttcatggtatcgatgaagttaaacgcctgctgtcgcgcctggcggatgtcacccaggcggtgatccttgagctggcggtgaaagaagagcctctctactggggcgtttctcagccggacgatccgcgcgagttgattgagcagtgcgcgttttatcgcctgattggtgagtttgatacccatttatcccccgtaccgcgcccgatgtacctggtcagcaaccatcgtgtgctgctcaaagattttaatcagccgtttcagcactggcaaaatcagccctatgccggtgccggcctggcgcataagcgcagccgtcgctacttctttggcgaagattatgtatgcaagtttttctattacgacatgccccacggtatcctgacggcggaagagagccagcgtaataaacaggagttgcataatgaaataaagtttctggctcaaccgccagagggctttgacgcgccagcagtactggcccactgcgaaaatgctcaatctggctggctggtgatggaaaaactcccaggtcgtttgctgagcgatatgctggcagccggggaggagatcgattatgaaaaaatccttggtagcttgcttcgttccttagcggcgctggagaaacaagggttctggcatgacgatgtacgcccgtggaacgtgatggtcgatgcccgacagcatgcccgcttaatcgactttggttctatcgtcaccacgccgcaggactgcagctggccgaccaaccttgtccagtcgttcttcgtgtttgtgaatgagctgtttgctgaaaacaaaagctggaacggtttctggcgctcggcgccagtgcatccgttcaacctgccgcagccgtggtcaaactggctatatgcggtctggcaggagtcggttgacagctggaactttgccctgctattggcgctgttcgagaagaaagcgaagctgccgtcagctgaacagcagcgcggggcgacggagcagtggattatcgctcaggagacagtgctgctggagcttcagtcccgggtgcgcaacgaaagtgccggctcggaggcgttgcgcggccaaatccatatcctggagcagcagatggctcgactgcaggccgctcaggatgcgttagtcgagaaagctcaacagccagtggaagtcagccatgaactcgcctggcttggtgagaatatggatcagctggcggcgctgttgcagtcggcacaagcgcactcccaggctgacgttcaacccgagctgcccctgaaactgctgagctactgcagcgcctggaagccgctaaccgggagatccaccatttaaataacgaaaaccagcagcttcgtcaggaaattgaaaaaatccatcgcagccgttcctggagaatgaccaagggttatcgttatctgggcctgcagttccatttgttgagacagtatggttttgtgcagcgttgtaaacattttattaagcgcgtcctgcggtttgttttctcatttatgagaaaacatccccagttaaaacataccatggtaaatgggttacataagctgggtctttatcagccggcctaccgtttgtatcgtcgtatgaatccgctgccgcacagccagtatcaggctgatgcgcagattttatcgcagactgaactgcaagtgatgcatccggagcttttacctccggaggtttatgaaatttatctcaaactaacgaaaaataaataaggagattaacttgcatattttgattgatgtccagggttaccagtcggaaagtaaattccgcggtattggtcgcagtaccctggccatgagccgcgccattattgaaaatgccggtgagcatcgcgtcagtattctgatcaatggtatgtatcccattgacaatattaatgatgtcaaaatggcctatcgggacctgctgacggacgaggatatattcatcttctccgccgtcgcgccaacggcctattgcaatatcgataaccacggtcgtagcaaagccgcacaggcgacccgcgatatcgctatcgccaatatcgcgcctgatattgtctatgttattagcttcttcgaaggccatggggatagttataccgcgtctattccagcggacaatatgccgtggaagacggtgtgcgtatgccacgatctgatcccgctgttaaataaagagcgttacctcggcgacccgaatttccgcgagttttatatgaacaagctggcggagtttgagcgggcggacgcgattttcgctatttcgcagtcggcggcccaggaagtgatcgaatataccgacatcgccagcgatcgagtgctgaacatctcctcggcggtgggcgaagagtttgcggtgattgattattccgccgagcgtattcagtctttaaaagacaaatacagcctgccggatgagtttatcttaacgctggcgatgatcgagccacggaaaaacatcgaagcactcattcatgcttacagcatgctgcctgctgaattgcagcagcgctatccgatggtgctggcgtataaggtgcacccgcaggatctcgagcgtattctgtgtctggcggaaagttatggcctctcccgcagtcagcttatctttaccggcttcctgaccgatgacgatctgattgcgctgtacaacctgtgcaaactgtttgtgttcccgtcgctgcatgagggattcggcctgccgccgctggaagcgatgcgctgcggggcggcgaccctgggttcaaacattaccagcctgccggaagttattggctgggaagacgccatgttcaatccgcatgacgtgcaggatattcgccgggtcatggaaaaggcgctgaccgatgaggcgttttatcgtgatctgaaggcgcatgctctcactcagtcggccaaattctcctgggccaacaccgcccatctggcgatcgatggtttcactcgcctgctgcagtcgtccaacgaggcggatgccgggcaggcggaaagcgtgaccgcatcccgcatccagacgatgcaaaaaattgatgcgctgagcgaagtcgaccgtcttggtctggcatgggctgttgcgcgtaatagctttaagcgccatacccgcaagctgctggtggacatttcggttctggctaagcatgacgcgaagaccgggatccagcgcgtttcgcgcagtattcttagcgaattactgaaatccggagtgccgggttacgaggtatctgccgtctactacacccctggcgagtgttatcggtacgcgaaccaatatctgtccagtcatttcccgggcgaatttggtgccgacgaaccggtgctgttcagcaaagacgatattctgatcgccaccgacctgaccgcacatctcttcccggaagtggcggcgcaaattgacagcatgcgcgccgccggggcgttcgcctgcttcgtggtgcatgatattttgccattacgccgcccggagtggagcatcgaaggcattcagcgtgaattcccgatctggctgtcctgcctcgcagagcatgccgaccggctgatctgcgtctctgccagcgtcgccgaggatgtgaaagcatggattgcggaaaatagccattgggtgaaaccgaacccgctgctgaccgtcagcaacttccatctgggggccgacctcgatgccagcgtaccatccactggcatgccggacaatgcacaggcgctgttagctgcgatggctgcagccccgtcatttatcatggtgggcaccatggagccgcgcaaaggccacgcccagacgctggccgccttcgaggaactgtggcgcgagggcaaagactacaacttatttattgtcggaaaacagggctggaacgttgatactttgtgcgaaaaattacgccatcatccccagttgaacaaaaagctattctggctgcagaatatcagcgacgagtttttggccgagctatatgctcgctcacgcgcgctgatctttgcctcgcaggggagggctttggcctaccgttgattgaagcggcgcagaaaaagctgccggtgattatccgcgacattccggtgtttaaagagattgctcaggaacatgcctggtatttctccggggaagcgcctgccgacattgctaaggcagtcgaagactggttagccctgtatgagcaaaacgcgcatcctcgctccgagaatatcaactggttaacctggaagcagagcgcagaatttctcctgaaaaacctgccgattatcgcgccagtcgcgaagcaataatcgctatcaacagggctaccccggtggcccttgtgatgagttcgttatgaaaattatttttgctactgagccaattaaatacccgttaacgggcatcggtcggtattccctggagctggttaagcggctggcgctcgcccgcgaaatcgaagagctgaagctgtttcacggcgcgtcgtttatcgatcagatcccccagatagagaataaaagcgataccaaagccagcaatcatggtcgtctgtcggcgtttctgcgtcgccagccgctgctgattgaggcgtatcgcctgctgcatccgcggcgccaggcgtgggcattgcgcgattacaaagactacatttaccatggtcccaatttctatctgccgcatcgtctggaacgcgccgtgaccacgtttcatgacatctccatttttacctgcccggaatatcatccaaaagatcgggttcgctatatggagaagtccctgcacgagagcctggattcggcgaagctgatcctgaccgtctccgacttctcgcgcagtgaaattatccgcctgttcaactatccggcagagcggatcgtcaccaccaagctggcctgcagcagcgactatattacgcgcagcccggcggagtgcctgccggcactgcaaaaatatcagttgtcatggcagggtatgcgttatatatcggcaccatggagccgcgtaaaaatatccgcggtctgctgcaggcctatcagctgctgccgatggagactcgcatgcgctacccgctgatccttagcggttatcgcggatgggaagacgatgtgctgtggcagttagtcgagcgcggtacgcgagaagggtggatccgttacctgggctatgtcccggatgaggacctgccttatctgtacgcggcggccagaacctttgtttatccctccttctatgagggattcggtttacctattcttgaagcgatgtcttgcggtgtgccggtagtatgttccaatgtcacttctttgcctgaggtggttggcgatgccggcctcgttgccgatcctaatgatgtagacgcgattagcgcgcatattttgcagagcctgcaggatgatagctggcgggaaatcgccaccgcgcgcggtcttgcccaggcgaaacagttttcgtgggagaactgtacgacccagaccattaacgcctataaattactctaagggtgtcagttgagagttctacacgtctataagacctactatcccgatacctacggcggtattgagcaggtcatttatcagctaagtcaaggctgcgcccgccggggaatcgcagccgatgtttttacttttagcccggacaaagagacaggtcccgtcgactacgaagaccatcgggtcatttataataagcagctttttgaaattgcctccacgccgttttcgttgaaagcgttaaagcgttttaagcagattaaagatgactacgacatcatcaattaccattttccgtttcctttcatggatatgctgcatctctcggcgcggcctgacgccagaacggtggtgacctatcactctgatattgttaaacaaaaacggttaatgaagttgtaccagccgctacagcagcgattcctcgccagcgtagactgcattgttgcctcgtcgccaaactacgtggcctccagccagatcctgaaaaaatatcaggataaaacggtagtgatcccgtttggtctggagcagcatgacgtgcagcacgatccgcagagggttgcgtactggcgggaaaccgtcggcgataatttcttcctcttcgtcggtgctttccgctactacaaagggctgcacattctgctggatgcagccgagcatagccggctgccggtggtgatcgtcggggcgggccgctcgaggcggaagtgcgtcgtgaagcgcagcagcgcgggctgagcaatgtggtgtttaccggcatgcttaacgacgaagataaatatattcttttccagctctgtcgtggcgtggtattcccatcgcatctgcgctctgaggcgtttggcattacgttgctggaaggcgcacgctttgccagaccgctgatctcctgtgagatcggcaccgggacttcattcattaaccaggacaaagtgaatggatgcgtgatcccgccgaatgacagtcaggcactggtggaggcgatgaatgagctctggcataacgatgagaccgctagccgctatggcgaaaactcgcgtcgtcgcttcgaagagatgtttactgccgaccatatgattgacgcttacgtcaatctctacactacgctactggaaaggaaaccctgagaccagctacccccgccgttgcggcgggggtcaatgcgttagtgccgactcttcagattctctatcacttcccctaaattcagcccctggtcctgcaacagcaccagcaggtgatacatcaggtctgacgcctcattcttcagttcaaacttgtcatttaccgtcgcggccagcgcggtctccacgccttcttctcccactttctgcgcaatacgtttggtgccgctggcatacagtttcgcagtgtatgagctctccgggtcggcatgcttgcgctcggccagcagttgttccagttgatagaggaacaaccactggtgtccggtttccccgaagcagcttgaagtccctttgtggcaggtcgggcctatcgggttgaccaacactaacaaggtatcgttatcgcaatccggggtgatgctgaccacattaagaaagttgcccgaggtttcaccctttgtccacaggcgctgtttggtgcgtgagtagaaggtcactttgccgctttcttgcgttttcgccagcgcgtcttcattcatatatcccagcattaacacttcgccagattcagcgtgctgtatgatggccggcatcatgccgtcggttttttgccaatccagctgttcacttaacataccctgatctccacgccctgggctgccaggaacgtttttaattcgccaatattaataatctgtttatggaatacggaagcggcgagggcgccatcgacattggcgtcgcggaaggcctcaaggaagtgctccatagttccggcgccgccggaggcaatcaacggaacgttacacacttcacggacctttctgagctgagccagatcgtaaccgttgcgcacgccgtcctgattcatcatgttgaggacgatttctcccgcaccgcgcttttgtacttcctgcgcccaatccagcgtctcccattgggttacgcgagtccggctttcatcgccggtgtactgattaacgtgatatttaccggtttgttcatcaaaccaggtatcaatccctaccacgatgcactgcacgccaaagcgatcggcgaggcgggtgattaatgttggatccgcaagtgcaggcgagttaattgaaattttgtcggcgccgaaggagaggatctgcgctgcgtcttccagagacttaatcccgcccgcgacgcaaaatggaatatcaatcacttccgccacgcgcgaaacccaacttttgtcgactacccggccatcgctggaggcggtgatatcgtagaacaccagttcatccgcgccttcatcggcataacgttttgccagcggcacaatatcaccgataatttcgtgattgcggaactgtacgcctttcactacctggccgtcgcggacgtcaaggcagggattatccgttttgccagcattggatagcctccgttacgttgaatttaccttccagcagcgcgcggccgacgatcacgccgcgaacaccggttccgcgcagcgcggcgatatcgttgagaccgccgatcccgccggaagactgaaacgccacctgcggataacgcgcgcagacttcttcatacaatgagacgttggaacccgcgagagtgccatcgcgggagatatcggtacacagcacatgttgcaagccgaccggcagatagctttccaccagctcttccagagtgacgccagagttttcctgccagccgctcaccgccacctgtttattgccatcggcatcaatgcggacgtccagcgccagtaccagatgctcggggccaaagcgtttaaaccaggctttgaccacctccggcgattttaccgccgttgaaccgaccaccacgcgcgccacgccggcgtcaagcagtgcggcaacgtcttcttctgtacgtacgccgccgccgacctgtaccggtaccgtaacgccggcgactaaggtcttaagcagcggaatctggcgttttgccggatcttttgctccggtcagatcgaccaggtgcaatacttccgcgccctggtctgcataggattgcaggcgtggtaacggatcgttgccatagtcgcgttgctggccgtagtcgccctgatgcaggcgcaccacggtaccgtcaattaaatctaaagctggaatgatcattacatctccaggaaatttttcagcagctgcgcaccggcgctacctgagcgctcagggtggaactgtacgccaaagaagttatctttctgcaccgctgcggtgaaggcctcgccgtagttgcattgcgcgatagtgtacgggttgaccggcatggcatagctatggacgaaatagaaataagcgccttcttcaatgccgcggaacaggcgatcgccggctttggcatacacccggttccatcccatatgcggcagcggcagtccgtgatcggtcattttcggcacctcttcatcaataatgcccagcagctcgacgccgtttgtctcttcgctgcggctcccgagtaactgcatgccaagacagatccccagcaccggctgggtacaggctttaatcaagtcaatgagttcgcgttcgtgcagctgatccatcgcagcctgcgcggtgccgacgccgggcagaaaaagtttatcggcgcgtagaacaacatccggctcgcggctgaccactggctcatagccgtggcggctcaccgcagatttcaccgagttgaggttggcgcacccggtatcgaggatcaccacgttcatcacaacaccccttttgacgatggcaacgtgtcgccctggacccgaatggcctggcgcagcgtacgaccgaaggctttgaacaggctctcgacgcggtgatgatcgtttttacctttggttttcaggtgcagcgtcaccgccatggtataggagagcgagcggaagaagtgttcgaccatctcggtgctcaggtcgccaacgcgctgataggtgaagtcagctttatattcgaggtgcggacggccagagatatccagcgcgcagcgcgccaggcactcatccatcggcagcacaaagccaaagcgattaatgccgcgcttatcacccagcgccagcttcaacgcttcgcctaacgccaggccggtatcttctacggtgtggtgatcgtcgatgtaaagatcgccgccgacgttaatttccaggcgaaagccgccgtgggtggcgatctgatcgagcatgtgatcgaagaaaccaacgccggtgtggatcttactgccgccttcacggtccagccagactttaacgtcaatctgggtctctttggtgatgcgctcaacgtgagcatagcggtcgcgacgggtcagctgttcgcagatggtcggccagttcagcgtttcactgttatagcgcaggccggtgatgcccatgttatccgccaactcgatatcggtggcgcgatcgccgatgacgtaactgtgggctttatccattacgccgtcttccagccacggcaataccatctgggtcttcggcttgcggcagtcacagttatcaccaggcatgtgcgggcagatcaggacggattcaaagttaacgccctgcgaggagaagacctgcatcatcaggttgtgtgggccgtcgaattcctcctgcggaaggctatcggtaccaagcccgtcctggttggtgatcatcaccagcttgtaaccttcctgctgcagcttaagcagcgccgggatcacctgcggctcgaaggccagtttttcaaaccggtctacctgaaaatcaaccggcggttcagagataagcgtaccgtcacggtcaataaagagaaacttctgggtcatacattctccgcagtcaaagcgtcaatcacgcgctggctctctgcacgggtaccgatagtgatacgcaaacagccgcttaatgagggttgtttattttggtcacgtaagataatgccctgatcccacaaagatttaaacaccgcgctggaggcggttatccgcgccagcaggtagttggtctcggaatcgaacacctgttcgacgcaggcgatgccgcgcagcgcatctaccaggtaagcgcgttcatccaggatctgcgctactcgcgcgcgcatggcggcgattcctgccgggctcagcgcctgggcagcgatatcggcaaccggcgtcgagagcggataaggtgcgatgacttttagcaatacattaattacctctgcgttagccagcgtaaaaccgcagcgcaatcccgccagcgcaaaggctttcgataaggtgcgcaggataaccaggtgcgggtattcatttagccaaccagcgagcgacgcctgcgggcagaactcaatataggcttcatccgctaccacgatcgctttaccgcgcgtcatttccagcagggcgcggaaatcttgcggattgattatctgcccggttggattattcgggctgcagacaaacaccactttcacgccggtgagattggcctcgatacctggcaaatcgagctgccagtcggcgagcgtcggcaccgtacggcactcaacgccgatggtttcggcgctgacgctgtacatgccataggttggcgggcaataaaggacagcgtcctcgcctggttcgcaaaaagcgcggatcagcagctcaataccttcgtcagcgccgcggctcaccagtacctgctctggttttacgccggcatattgcgcgtagttttcgataaccgctttcggctgcggctccggatagcggtttaacgtctgttcggtcaactggaattccacggcggtggggaattcgttggcgttcaaccacacgtcgcctttccccccaagacggcgggcggattgatacggcgtcagcgcgcgaatattggcgcgggctaagtcttcaatgctcatgcttgctccttaagggcggctacgcgtagcgtcacggcgtttttgtgggcggtcagcagttcggctgcggccaggatctcgatagtcggggcgagggcggcgaagccttcacgcgtcagttcctgtacggtcatgcgcttctgaaaatctgccagaccgaggctggaacaggtcgcggtgtagccgtaggtcggcagcacgtggttggtgccggaggcgtaatcacctgctgattctggcgaccagtcgccgaggaataccgaaccggcgctggtaatgtcgtcaaccagttcacgggcgttgcgggtctggataatcaggtgctccggtccgtactgatttgagatctctacacattgcgcgagatcgcgagcgacaataatacggctggcggaaagcgcttcacgtgcggtttcggcacgcggcagggcagccaactgacgttcaaccgctgcggcgacccgggagcccatgtcggcgtcgggggtcagcaggataacctgggaatccgggccatgttccgcctgggagagtaaatcggaggcgacgaaatccggcgtcgcgccgccgtcggcaatcaccagaacctctgacgggccggcaggcatatcgatagccgcgccgtcgaggcgctggctgacctggcgtttggcctcggtgacgaaggcgttgccagggccaaagattttagcgactttcgccaccgattcggtgccaaaggccattgccgcgatagcctgcgcaccgccgacgttaaagatattacgcacgccgcacagctgcgccgcataaagaatttcatcggcaatcggcggcggcgaacacagcaccacttcctgacagccggcaatgcgcgccggcgttgccagcatcagcaccgttgaaaacagcggcgccgagccgcccggaatatataagccgacggaggcgatagggcgggtaagctgctggcagcgtacgccgggctgggtttcaacatcgacaacctgcaaccgctgcgcgttgtgaaaggtctcgatattgttgaccgctaccgccatcgcttgtttgagttcgtcgctgaggcgcgcgccggcagcggcaatttcttcgtcagatactttgagcgccgtgacggtggttttatcgaatttggcgctatattcgcgtaaggcggcatcgccattctctttaacgttgccgaggatcccggctaccgttttgctgatgctctcggaagctgaaatcgccgggcgcattaatagttgttgctgttgtgcagcgctgcagctattccagtcgataatggtattgaagctcatggtcatttcccctgtttgtcccgtatgcggattgctggattactccatcatcttctcgatcggcagcaccaggatggagctggcgcccagcgctttcagtttttccatggtttcccagaacagggtttcgctgctgaccatgtgcatcgctacccgctgtttgtcgcccgccagcggaagaatagttggccgctcggcgcccggcagcagcgccaccacttcctccagccgttcggtcggcgcgtgcatcatgatgtatttcgattcgcgggcctggataacccctgaatgcgggtcagaagacggtcgatcagttgctgtttcgcatcgtccatctcgccgtcgcgctggatcaggcaggctttggaacgataaataacttcaacttcgcgcaggccgttagcttcaagggttgcgccggtagaaacgagatcgcagatggcatcggcaaggccagcgcgcggggcgacttcgacagaaccgttcagcagacatgatttaaaggagatacctttctgatcgagatagcgctttaacaggtgcgggtaagaggtggcgatgcgtttgccatccagcgccgccgggccattccagttttcatccacaggtgtcgccaacgacagacggcatccgccaaaatcgagacggcgcagggtgaaatagcgcgggtcttcgccctgcgcgcggcggctcagcagctcttcttccagcacgttctcgccgataatgccaaggtcgacaacgccgtccatcaccagccccggaatatcatcatcgcgaacgcgcagaatatcgatcggcatgttttccgcaagggcgatcagacgctgggtgtgcaggttgactttaatgccgcagcggccgagcagttcgcgtgaatcttcacttaaacggccggatttctgaatagctatgcgtaaacgggagttgtctaacattgttgttttcctctgaatacctgtctgaatctgtccgaatccggtccaaaaaaaagccccggaagtgaatcttccggggctctctttgcgttcatgcaccactggaagatccaaacgtcttccagcacacatcgcctgaaagactagtcaggatgatggtgatggtggtggtttttaaattgaacgctgttcataaaattctctttgaatgactatgcatttgatgtcttttaacctaaaccagttccggcgcataaagcaagcccttttttccatcattaattcatttcatattcgtcgaacaaattgtcaggtctcgcaggctggcgtagcctagtatcagcacagcgaatgagtcaggagccagggtatgaaaaaggtcgcgattgtcgggttagggtggctgggcatgccgcttgcgttgtcattgcgcgcgcgtgggtggcatgtcaccggcagtaaaacgacgcaggacggcgtagaggcggcgcgaatgtgcggtattgaaggatatccgctgcgtcttgaaccccagttgatatgtgatgcagaggatctggacgcgatgatgaacgttgatgcgttggtcattacgttacctgcgcggcgcacgggccccggggaagatttttatctacaagctgtgcaggagattgtcgataccgcgctctcgcggcatattccacgcattatttttaccagttcgacctcggtttatggcaataccgaagggacgatgaaggaaaattcgccccgcaatccgcagaccgctagcggcagagtactgaaagagctggaagactggctgcatgcgttgccgggcacctcggtggatattctgcgtctcgccgggttggttgggccatcgcgccatccgggccgtttctttgccggtaaatcggcaccggatggccagcacggggtcaacctggtgcatctgcaggacgttattgccgcgattgagctattgcttcaggccccgaaaggcggacacatctataatatatgtgcgccgcagcatccggcgcgcggcgtcttttatccgcagatggcccgtgaacttgggctgccgttaccggtatttaccgataacccggaaggcggtaaaggcaaaatcattgatggcaaccggatctgctatgagcttggctttgaataccagtaccccgatccgctggtgatgccgatggagtaaccaccagcaggcattcgcgtaccgtaaggggggcgatgaaaccactgctggatgttctcgttattcttgatgccttagaaaaagaggggagctttgccgcggcttcggcaaagctctataaaaccccctcggcgctgagctataccatccataaattagaaagcgatctgaatatccaactgttggatcgcagcggtcatcgggcgcgctttacttgcaccgggcagatgctgctggagaaaggacgtgagctactccataccgctcgcgaacttgagctgcaggccatcaggttacatcagggctgggaaaataccctgaccatcagtgtcgatatgacttttcctttctctcttttaacttcactgatggaacagttttatcaacaacgcaacgtgacccgtttgcagttcactagcgctggtggttgggatgctctggcggcaggcgaagtcgatatggtgctgggcgcgcttaacgagccgccaacgctggtgggttatggttttagtctgcttggcgaactggatctgtgttttgtggtcgcgattaatcatccgctggcgcaggctaaggaaccgttgactttgcgggggttacagcgatatcgggcgattatttgcgatgtcagtttgctgccaggcgaaaagcaggagagtgtgacggtttatgatatgaatagcctgctggaactggtatgcgccgggctgggctgggcttacctgccgcgctatctggctgaggcctggctggagaagggaaaattggtcgagaaacgtattaccgcacccgcgcggctgcatcgggcatggattggctggaatgaagatgtttttggccttgctgcgcaatggtggttacaatcgattttagcaaatagtgctattcgtcagatctacaatactaaaatagtatgaatattagacggttagaattcttagcctattaataaatcttacaacatcttgtcattaagccagaagttgttgcaaaatacgcagcctgaaaaccagagactagccgacgctttttttaagtgtcggttatttttttggtcgaaagacacatcattcaataccaagaggccgggcttcgtaccggatagatatttactaaaaaccgacagtcgttgtcgctgaggaatagaaagaaatggggcaattttttgcttacgcgctggccttcgccgtaaaaggggataactatgtcgcataacgctactccaaatacctctcgcgtggaattacgtaaaacccttacgttagttccggttgtaatgatgggcctggcctatatgcagccgatgacgctgttcgatacgtttggtatcgtctctggtatgaccgacggtcacgtgccgacggcctacgcctttgcgttaatcgctattctttttactgcgctgagctacgggaagctggtacgccgttatccttccgcgggttccgcgtatacctacgcccagaaatccattagcccgaccgttggcttcatggtgggttggtcctctctgctcgactacctgttcgcgccgatgatcaacatcctgctggcgaaaatctactttgaagcgctggtgccttcgattccatcgtgggtgtttgttatcgcgctggtcgcgttcatgactgcctttaacctgcgcagcatcaagtccgtcgccaacttcaacaccgttatcgtggtgctacaggtggtactgattgccgtgatcctcggcatggtggtgtatggcgtatttgaaggcgagggggccggtacgctggccagcagccgtccgttctggtccggcgatgcgcacgttatcccgatgattaccggggcgacaatactctgcttctcatttaccggctttgacggcatcagcaatctgtctgaagagaccaaagatgcagaacgcgttattccgcgcgctatcttcctgactgcgctgattggcggcctgatcttcatttttgccacctacttcctgcagctgtacttcccggatatctcgcgctttaaggatccggatgcctcacagcctgaaattatgctgtatgtggcaggtaaagccttccaggtaggcgcgctgatcttctccaccatcaccgtgctggcttccggtatggcggcgcatgctggtgttgcgcgcctgatgtacgtgatgggccgtgatggcgtattcccgaaaagcttcttcggctacgtgcatccgacctggcgcactccggcgatgaacatcatcctggttggcgcgatcgcgctgctggcgattaactttgacctggtaatggcgactgcgctgattaacttcggtgcgctggtggcgttcaccttcgttaacctgtcggttatctcgcagttctggatccgcgagaaacgcaacaagacgctgaaagaccacttccagtatctgttcctgccgatgtgcggcgccctgaccgttggcgcgctgtgggttaacctggaagagagctcgatgatcctgggtctgatctgggccggtatcggtctgatttacctggcgtgcgtaaccaaaagcttccgcaacccggtaccgcagtacgaagacgttgcgtaattacgctttatgatagaaaagccggagggagacctccggcttttttgtttctggcgtccgctggttttccccgctggcggctgtcgctttaccggggcacagggatggcttacttctcctgtcgcatcacattaagcagcgtatccaacagccctggaaaacgggcatccaaatcgtcgcggcgaagcgaaatgagattttcccgcccctgaggacgttgccagatcacgccgctgtcgcgcagcacccgccagtggtgagtcatggtggatttagcgatatcttctttgcgcaatgcgttacaactctgctcgctaccgtcggagagcgtgcgaatgatttccagccgcaaggggttgcccagggcaaaaagaacattttcgaggcgaatttgttcacgttcggggtgattggcgatcataatattcctgtgtcggcggttgtgctgttcacgcgaacagcagcccgtatcggcggctggcggctactatacccaaactccttttcttgcgccacgcgcgccgtcgcaacctgaccgatagcagtgatagtaaaaatagttcgaatatactcgtacaattgtactattatagatgccgtaaacctaaccgcggcagatttagccgctcattgacagtcaaaatgactaaggacgcatcatgccccgacccatcccctcgaacgttatcgcaacatcggtatctccgcgcatatcgatgccggtaaaaccaccaccactgagcgcattctgttttacaccgggatgagccataagctgggtgaagtacacgatggcgcggcgactaccgactggatggcgcaggagcaggagcgtgggatcaccattacttccgcagcggtaagttgcttctggcccgggatggaccgcagctttgagccccatcgtatcaatattattgataccccagggcacgtggattttaccatcgaagtagaacgctcgatgcgcgtgctggatggcgcggtgatggtctatgactcggtcggcggcgtgcagccacagtcggagaccgtctggcggcaggccaacaagtatcatgtaccgcgactggcgttcgttaacaaaatggaccgcccgggcgccgatttcttccgcgtggtgcaaatgatgatcgaccgcctgaaggccaatccggtgccgattgttatccccattggcgccgaagagcatttcaccggcgtcgtcgacctgataaagatgcgggccattctgtgggatgatgcaacgcaggggatgacgttcagctatgcgcctgtgcctgatgacctgctgccgacggctcaggagtggcgggaaaaaatggtttcggccgcggcggaagccagtgatgagctgatggataaatatctcgaaagcggtgaactgagcgaagcggaaattgtggccgggctacgtaaacgcacggtcggcggcgaaatccagccggtgctctgcggcagcgcctttaaaaataaaggcgtgcagcggatgctcgatgcggtcgttgagttaatgccgtcgccgctggatattccggcgattcagggcattgatgataacgggcaaccggcggagcgtcacccgagcgacgatgagccgctgtctgcgctggtgtttaaactcatgaccgatccctacgtcggccagttgacctttattcgcgtctattccgggacgttgaaaaaaggcgatgcggtctttaacccggtgaagggcaagaaagaacgtatcgggcgcatcgtgctgatgcatgccaacgatcgccacgaagtcgacgagctgcatgccggtgatattgctgcctgtgttggtctaaaagatgttacgacgggcgatacgctgtgcgatccggatgcggtcatcactctcgagcgtatggagttcccggaaccggtcatttcgttggcgattgaaccgaagaccaaggccgaccaggagaaaatgggcattgcgctacagcggttggcttccgaagatccgtcgttccgcctgcataccgatgaagagtccgggcagacgattatctccgggatgggggagttgcatctggagattatcgtcgaccgtatgaaacgcgagtttggcgttgaggcgaatattggccgtccgcaggttacctatcgggaaaccatccgtaaaacggtgaaggatgtggaaggcaaatttgtgcgtcagtccggcggtaaggggcagtatgggcacgtcgtgctgaccctggagcccttggcggcggggagcggctttgtgtttgaagatgccaccaaaggaggggtcgtaccgcgtgaatacatcccttctgtggagaaagggctgcgtgaagcgatgggcaccggcgtgctggcgggctatccggttgtcgacgttaaagcgaccctgacgtttggttcgtatcatgacgtcgattcatccgagatggctttccgtatggcggcgatttttggctttaaggaaggggcgcgaaaagcggacccggtgatcctggagccggtgatgcacgtcgaggtggagacgccggaagagtacgccgggaatattatgggcgatctctcttcccgtcgcggaatggttcaggggatggaggagcgtttcggtagccagataattcgtgccgatgtgccgctggccgaaatgttcggttattccaccacgctgcgctcgatgtcgcagggtcgcgcgacctatagcatggagttccatcattacgcagaagcgccgcgtaacgtggccgacgacatcatcgccagccacgcgaaaagttaaatcagtactcccgggctacggtgacggcctggcccgggttaaacgatttcctgcgcatattgccacagcgctttcaacagggcctgtttttcactatcgtcagcatactgttgatacatcacctgcagttcatcggcataggcctgcaaaaactctggcgtaaagacgttacggcggtgctctaaccagcgctgctgttcgttttcatcaagcgtaccggggaagttacgcgcgcggtagttaaacagcaggcgttcaatgcgtttatccgcaaacgtaatatccagcgctggcaggttacgcggttcggtttccagcacaatcttcatcgccgcgcgatcggcatcgctaaagaatccgttgtacagttgggcatcaacattatccgatggcacgaacggttcggcttcggcatacagcgcgactaccttttcgcgcacctgcggatttgcgcgcagcagttgggcgttctccaggcagcgctgaatattaatgcctaaacggtcggcatcctgcgggcgcaacgtattggcctgcgccagcaccgggcatttatttaaatgcaccagcttaattggcgctgccggtaaatcaccgagttcgtctcgtggagtatacaggcgctcgcgcaatgtatcggcatcgagctccaacaacggcgacatatcacccgccaggtcaaccataatcaccgcattgcggttatccggatgccaggccagcggcgcgaccaggctggtgttgccgcgggcggcgccgaacataccggaaacgtggaccagtggtttcaattgcggcacgtcaatcaacgtcgccagcttgcgtttatttcgatgactgtacagatattcaaacagacgcggctgatgggtctttaccagtttcgccatcgcgatagtggcgtacacatcggccatcgcgtcgtgagcattgctatgctcaatgccattcgcgacggtcagatgctcaaggcggaagcttggcagaccgtcttcgttttccggccagttgataccttccgggcgcagggcatagcaggcgcgcatcacatccagcaggtcccagcgcgaattatcatgctgccagctccaggcgtacggatcgtaaaagttgcggtaaaaaatattgcggctgacttcgtcatcaaagcggacattgttgtagccgacgatacaggttttcggtaccgtgaacagatcgttgatacggcgggcgaaagcggcctcgttgtcgcctttggccagcgcttcctgtggcgtaataccggtaatcatcaccgcctgcggttgcggcagatagtcgtcggcaggcttgcagtagaagacttccggttcgccaatgacattcagatcgctatcggtgcggatggcggcgaactgcgccggccggtcgagcgaagggctggtaccgaaggtttcgtagtcgtggaataaaaatccaggctgattggcgctgtcatgcatattcgattcgttatccgtggtgtaaggcattccgtatggtaaacgatttgtagaaccatcagaagggtaacggttagatgcatctactctcatgtcatattttcttgcaatttacctctgatctctcaggcgaacttccgtaaaaaggacggcgaatctgtaaatcttgaggatatgccgttgaaaggccgttttttatttgctgtaactttgctcgcttcgagcgtttcctgcgcatttgctgccgctgatttgcccgtcaccgcgacgccgccatcgatccaggccggttcctgggtgctgatggactacaccaccggtcaaatcctgaccgccgggaatgaacatcaacagcgtaaccccgccagcctgaccaaactgatgaccggttacgttgtcgaccgcgccatcgacagccatcgcattacctttgatgatatggtcaccgtcggtaaggatgcctgggccaagggcaatccggtgtttaacggttcttcgctgatgttccttaaagcgggcgatcgggttagcgttcgcgatcttagccgcgggctgatcgtcgattccggtaatgatgcctgcgtcgcgcttgctgattatgtcgccggcggccaaccgcagtttgtcgcgttgatgaatagctacgttgaaaaattgcatttgaaagacacccattttgaaaccgttcatggactcgatgcgccgggtcagcatagctccgcctatgatttagcggtgttgtcgcgggccataattcacggtgagccggatgtctatcatatgtatagcgaaaaaagcctgacgtggaacggtataacccagcagaaccgtaacggtttgctgtgggacaaaaccatgaatgtcgatggcctgaaaaccggccatacctcaggagcgggcttcaatcttattgcctcggcggtcgatggccagcgtcgtttgattgccgtggtgatgggggccgatagtccaaaagggcgagaagagcaggcggctaagctgctgcactggggtcaacagaactttgacaccgtgcaggtgctgcaaaaaggtaagcaggtcggcgtcgaacatatctggtatggcgacaaagagcagatcaagctcggcaccgatcaggacttctggctcgcgatcccgaaatcagaagttccacgtatcaaagcaaaatatgtgctggataccaaggatctggaagcgccgatcgccgctaaccaacgcgtgggcgaaatctcgctttacgatggcgacaaagtggtcgggcattggccgctggtgacccttgaaagcgtcggcaagggcgggatgttttctcgcctgagcgattatctgcatcacggtatttaagcttgttaccctctggcccgccgcactctgcggcgggctttattcatttcgcgcttgtggcgactctgtgaatccgcgcacatactgttgttcatccggctgctaaatttagtgtatatttatacagtattttatcaacactggaggcgctatgaactacagcattaaatctcttaatgcccgcaagattgccgggtttcatatggttggcccctgggagcagaccgtaaagcaggggtttgaacaactggcggcgtgggtcagtcaccaccaggtgcctgcgcaggagtgggtcgcggtttattatgataatccgcagcaggtacctgcggaaaaactgcgttgtgacaccgttgttaccgtggcggatgattacgtcatcccgccgaatagcgaaggggtcatcctcactgcaattgccggcggcgattacgcctgcgccagcgcgcgggtcattaatcatgatttctccacgccgtggctgcagttctttgacagcctgctgcagagcagagagttccaaatcgcggataagccctgttttgaaatttatcttaacgatggcaaccaggatggtcactgggatattgagatgtacgtggcggtgaaccgtatcggctcgtaagtcgttatcccttatcttgacaaggttttttacattagcgcagtgcgctcgtgaaaaaagcggctacaattggccttttctgtttgccggagcaggccgtgcgcgctgataaatcacttaagccatttgagatccgtctgtatcgtcattaccgaattgtgcacggtatccgcatcgcgctggcttttgtcctgaccttcctgctggtgcgtctgctgaacgtgccggagggcacctggcctctgatcaccctggtggtggtgatggggcctatctctttctggggcaatgtggtgccgcgggccttcgaacgtattggcggcactatcctcggttcggtgctggggctggtggcgctcaaactcgaacttatctcactgccaattatggtgctgtggtgcgcggtggcgatgttcctctgcggctggctggcgctcggcaaacggccctaccaggcgttgctgatcggcattacgctggcagtggtggtgggcgcaccgccgggcgatatgaacaccgcgttgtggcgaagcggcgatgttatctttggttcactgttggcgatgctgtttaccggtatctggccgcagcgggcgtttttgcactggcgcatccagatggcgaattatgtcacaacgtttaatcggctgtatcaggccggtttttcgccgaatctggttgagcgcccgcggctggaaaaacatcttcagaaagcgctcaatgacgtggtgaaaatgcgtgggttgataaccccggccagcaaagaaacgcatattcagaaagcaatcttcgaagccatccagaccgtcagccgtaatctggtatgcatgttggaactgcagatcaacgcttattgggcctctcgccagggccattttgtgatgcttaacgcccagactttgcgcgaaacccaacagatgacccagcaaacgttgctgaccatcgcccatgccttgtatgagggaaacccgcagccggtacgcgccaacaccgagaaactcaacgagattgtggtcgagttgcgacagcttatcaaagagcatcaggacgataatctgtcggaaacgccgattcacggctatgtttggctgaccattgagctggcgcgccagcttgagctgctgtcgcaccttatttgccgcgcgctgcgcaaataaaagacagatacgtgcgcgaagtgaacaggttgcttcgattcagcagcatttagggttatgataaacgcaaaggaaaaaacattgtcatcagcgactgctagcagttatgttagccctatacggcagtcgctttagcgaatccgaatctcaaatattaggggtgtaaaaatggaaacaactaagccttctttccaggacgttctggagtttgttcgtctgttccgtcgtaagaacaaactgcagcgtgaaattcaggacgttgagaaaaagatccgtgataaccagaagcgtgtcctgctgctggacaacctcagcgactacatcaagccgggtatgagcgttgaagccattcagggtatcatcgccagcatgaaaaccgattatgaagaccgcgttgacgattacatcatcaaaaacgccgagctgtcgaaagagcgtcgcgacatctctaaaaaactcaaagtgatgggtgaagccaaagtcggcgaataaaccactcattagttccggcggcattgctggccgccgggctcctccatcttcctgccgttaaacctctgtataagcatcgccctttaagccgacagtttgttatactgccgccgtgaacttattgataccggaagggtttatcacatgctgtcccagctacaggtaccgccgcgatgatactgattaccggcggcgcgcgtagcggcaaaagccgtcacgccgaatctttactccaatccttcgcatcggtgctctatatcgccacttcagccgttattgacgatgaaatggctgcacgcattcaacatcaccgcaatagccgcccgtcgcactggcgtactgcagagcgcagccgtgacctgacgccactcattacccccgctaatgcacccgatgaagccattttgcttgagtgcgtcactacactggtcaccaatattctgttcgctgaaggtggggaaacggatcctgatgaatgggattacgctgcgctggaaaaagcagtcacgcaagaaatcactcagctgattgctgcctgccgcgcctgcccatcgccggtgctgctggtcaccaatgagatcgggctgggaatcgtgccggacaaccggctggcgcggcattttcgtgatattgccgggcgcgtgaatcagatgctggccgcggctgccgatgaggtgtggctggttgtttcagggataggagtcaaaatcaaatgattaaatcgttctttgccacgctttcctttatgagccgcctgccggttccggcccgctggtcgcaggggctggaaatcgatcaatatgagcgtgggattgttacttttccgctggtagggttactactcggcgcgattgccgggctggtgatgctggcgctacatgcctggtgcggcctgccgttggccgcgctgtttgccgtactggcgctggcgctgctgaccggcggttttcatcttgatggcctggcggatacctgcgatgggatcttctcagcccgccgccgcgagcggatgctggagatcatgcgcgatagtcggttggggacgcacggcgggctggcgcttatctttgtgctggtgacgaaggtattcgtcattagcgaactggcgctgcgcggtacctcgatgctggcggcgttggctgccgcctgcgccgtggcgcgtgggatgtcggtgctgctaatgtaccgccagcgttatgcccgggagcaggggcttggtaacgtatttattggcaaggtgactttccgccagaccgtaattaccctggcgctatcattggcgctggcaacgctgctgctgggcgtgcatggcctgctggctgcggttataacgctgctggtggtatcggcgcttggtcaggcgttgaagcgcacgctgggcgggcaaaccggcgatacgctgggagcggccattgaactgggtgaagttatctttttactggcgttgctatagagtacacaccgcgctgacaggaagcatatgaatacaataagtgaatggttagcggccatcccgcggccggacgaaagcgcgatgtcgcgggctcgtgagcatattgatggcttgttgaaaccgcccggcagcctgggacgtctggaatcactggcgattcagttggccggtatgccggggctacagggcgcgttacgttttccacgcaaaactatcatggttatgtgcgccgaccacggcgtctggcatgaaggtgttaccgtctcgccacaggctgtgaccgctatccaggcggtcaatatgacccgtaagaataccggtgtttgcgtgctggcagcgcaggccggggctgatgttcaggtggttgacatcggtattgacgccgaaccgatccctgggctggtgaatatgaaagtggcgcgcggcagcggcaatattgcctgtaccgcggcgatgagccgggagcaggtcgaagcgctgctgctggcgagcatgcgctacacccgccagcttgcggagcagggcgtgcgtctgtttggcgtgggcgagctggggatggcgaacactacgcctgctgcggccgtggtcagcgtgctgaccggccatgatgccggcgatgttgtcggcatcggcgcaaaccttccgctatcgcaactggcgcataaggcggaagtggtacgccgggctatagcggttaaccagccttcatccgaagacggcctcgacgtgctggcaaaagtgggcggttttgatttgctcgggatggctggggtcatgctgggcgccgcttcctgcggattgccggtgatactcgatggctttttatcgtacgcttcggcactggcagcctgccggatcgcgccacagttgcatccgtacctgattccgtcgcatctgtcggcggagaagggggcaagtattgcgctggagcacctgcagttacaaccttatctggacatgggcatgcgcttaggcgagggcagcggcgcggcgttagccatgcatctggtcgaggcggcaggggcgatgttcaacgacatggggacgctggcagggagcaatatcgtgctgccggaaacccgttaaccggcttcggggcgccgaccggccccccgagatagtgcttacagcgcctgctgccacacgctttgcggcagcagataaacatccgctttagcctgcataccgtcggtaacgatatgacgaatgccgctggccatcaccgcaagggtgacatcaaacgcattcaggctatcgccaaaaccggcggtaaggttgagcattgagccatcggccatcagatagattgttttccccggcatccgataagcgttgatatagggcataacctcttcatgcgggaactggcgcaggtgttcgcagtcaatctcttccgccacgtggccgacgttgagaataaacacgccatctttagcgctgtccagggccaggctgttgaccactttcttgccgccggtggcggtagcgacgacgtcagctgatgcgattgcatcctgtaaatccacgacatgccagccgtcataagcggcctgtaaacggcgcgccggatcgatttccgccaccataacctggccgccgaaggcttttgccgcggcggcgacgccttgcccaaccaggccgtagccgatcaccagcacttttttctcatgtagggtaaggtgggtggtctggaagaatgtgtgccatgccgtcaggccaaccatatggcggttatgtagcccttctttgaccggcaggtcatcccagttaaagatagggtagccggggcgaatatcaccgaggcgattgacaccggagccggtggcttcaaggccagcgacgacattgccgaactcgccgcgctggtggagcagggtggtaatatccgcgcccatttcacaaaggtgagttggcccccaggcgatggctttttcccatgattgttgccagtcagcgtcgctcatattgcgccaggcgcaggcttccgcgccgcgctccaccagccaggagacaacctcatcctgcacggtggttggattacaggtggtcaaaaagacttttgcccctttctcaaggagcccctgtaccagcgggatcattttcatatccagatgcatacagcaggccaggcgcacttcgctgaggtcgggaagggccgccacctgacgcagggtacgcggcatattctggctggcccatgccacttctttcgttaaatttgtcttattattcaccgtattgtgacctttaatccgtagagtgggtttaaccccggtggggaagatgattctaacgcagcgcgtaaaaatcacataacacacactgaacggtaaagttgcaaataataggcatcataaatacatggttgttaatgaatggttaaataaagacaatgaaacataatttattcctatgatgtgagcgattcgttcgatgttacgcgttttacagcgcccgctattttcccgcgcgcgtatttttctcggccgtttaaaacctcatgctttacctgtcgctaaaaaacatattttattgggctcaatcggtgccggaacgggccttgcggtcaccagtatgttcagccactggctgctgggcgaggtgaatctgtggtttattgcgccgatggggcctcggcggtattgctattcggcgtgcccagcagcccgcttgctcagccctggtctatcgttggcggcaacgtgctttcggcgctgatcggcgtcaccgtgggactattggtgccggatacggcaattgcctgcggcctggcggcggcgctggcgatcgccgggatgtactttttacgttgtctgcatccacctggcggcgcggtggcgctcacggccatacttggcggagccggcgtacacagtgaaggctatcagtttgtgctgaccccggtattactgaactccatgatgctggcgctgctggcgatcgtcttcaacaatctggtcggtcgccgctacccgcatccgttggcggcggaagaggtgaagccgaatgtagtgccgatggggattgcagtcactcgcgaagatattcacgccgcgctgatggaagggcagttccttgatatcggcgaggacgatgtgcaggaactactggagaatatcgaacagcaggcccgtctgcgtcttgccgccggtgaaaaagcgtgccagtgacgcgctgttaatccactcattacagtgtattagctagcgccagcctgaatcgctcgatgaggtcggcttcaccgggcaataattcggcgagcgtaatcgttttgtccgcgcggtagatcttaccgctgccgagcagtgcctcgatatcattggccgcctgatgcgcggcctgcagatcggcatccagtaatatcaccgcgtgagccaggacgatgtgcacctggctttcggctatgggccgccagtattgagcggtaccggcaatcttgcgtgcgttttctccctcaccgcaggccagattatagcggccgtcgcaaaaagaaccgctaacagcctgaaaatggctttcgatgccaagagtcgaaagcgtgcgttgcaatattccacacaacaacagatagataggttcggcggcttcgcctaatggctgggttaccggccaggcaagactcaggttgaggatccccggcccctgcggcaccagcccaccgccggagcgacgcatccacaccggccagccgcgggcggcaaaggcgtcgctgacggcggccagattggcgaatttccggtaactgccaggaaccacgaacccttgcggcgcctgccagagctgagcgacggcttctccgcggcgcgcgcgctcgaacaaaggctgttcggcgagcgtgggatcattgcaactgacaatcggtaattcgccggtattgaagcggatgggcaaacagcctgcgttatgtggttcgcgcataaagcctccctttttatgccggatggcgggttttcatcaacatcgccgtgacggcagagatcaggcagccgaccgtcagataaatcgccacgctgtgccacgagccgccagagaaggtgaccagcgcggcggcgataaatggcgtaaaaccgccgccgaccacgctggccacctggtagccgacgcctgcgccgctgtagcgatagctggcgccaaacatttcggtaaacattggttgctgcacgcagaccaccatatcatgggcgatgttggccagcatcagggcaaaaaacaggatccagaacagcgagtgctgctccagcgccataaagaaggggaagccgcttaatgttccgattagcgccccggtaatatagatacgacggcggccaaatctatcagccagccacgcaaagcagggaatggtaatacagcttatgccgcccaccagcaacccaatattgaggaacagttcacgtggcaggccgagattttgagtcgagtagttgagggcgaatgcggtcacgatgtacatcgttaacagttcacacaggcgcagggcgatgatcaacaagaaggcgccgggatggcgcgccaacgcttccagtaccggcaggcgttttttctccgcggctggggttttctgcagctgctgttcaaattctgccgactcggtcatgccgttgcggatccacaatgcccccagtaccagcactacgctaaacaggaatggcaggcgccagccccagctaaggaactgctcatcggtggtgaaactgctgataagcgataccagcccagtagagagtaacagaccgacgccgtaacccacctgcacgccgctgctatagaaagcctttttgttttttggcgcgctttcaaccgacagcaacgccgcgccgccccattcgccgccgacggcgaagccctgcacggcgcgtaaaataaccaacaaaaccggcgcccaccagccaatttggttaaaggaaggcagtaggccgatgcaggcggtggcgatccccatcatccacacggtcatcatcagcatgcgcttacggcctaaacggtcgccgaaatggccgaagatcacgccgccgagcgggcggaagaggaagccgacgccgaaggtcgcgaaggctgcgagcgtgcccatcgccgggccaatttgtgggaaaaattcgcggttgaacaccagtgcggcggtaatgccgtacaacagaaaatcgtaccagtcgacgacagcgccggcaaagcttccccatgccgcacgacgagcgcgatgaagagaagtaacccccttgccggagtcgggagaaataagcgttgagtccatgcctgtcctgtttgttgctaacttgttattatttgaatgagacgctttcttatcttcgcgccgttagggagattaccgcgcataagcgcaactgaaaagttttttacctgtatgaaagacaataaagtaaaaaatgtctaaatcgaacatttaattttcaccgttggcgtgggttaactgttgaccataactgctattttatttttgttgccctactgggacagcttttaagaattcacgtaaatggtttacaattactatctccaacgctggatatggtgggtgatatgcgtctaatttttgcagttttattttatgttttagttttacctaatgctttcgcagaaaaactgcctgcgccaacaggcaaacccgttttaaccatttcaggaaagattaccaatacaaacgaaggtgataccgccgtatttgacgttgccgcgttagaaaaattgggcaatgagacagtgatcacaaccaccccctggtattcaggaaaagtgcgctttgatggtatttcacttagcaaacttatgaacttagtaggtgcgcaaggtaagacggcgaaggtgatggcccttaacgattatacgaccgaggtgccggtggatgattttcataaattcccggtgatcctggcgctgaagatgaatggtgaatatatgcgcattcgtgataaagggccgctttttattgtttatccctacgatagtagcgcggagttacagaaccaaatctattattcccgctcggcatggcaggtttcaaagattataattgagtaaggctctgatcttgaatcgaatactcactgccattattttgtcgctttttatcgtcaccggatacattacctatctggtgcatgagcggcagagcgaactgcaaaaattaacacgttataccgactcgtggtctgtgtcccagatggtctccgaatacatgcgactggaggctcgtttaagcgccctggcgctgagcgtgaaggggaccgaccgcgatgaggtacgcctgcgcctggaaataatgatgagccagatcgagttgctgcaacagggcgagcttggccagttcatcagaaaaagcgagcagcggcaggcaacggtcaccagtctgatacagatcctcgatcaactcgaccggcaactggacaccatgacgcctgagcagatggtgactttgctgcataccatgagtaagttagatggcccgatgacctcactggcctccatgactctggcgcaggactttgatgtcgttaatcttacgcacgataaaattcagcatctttattatatctattcggtgatttcaatcttgctgattacgatgtgtatcactcttggcttattgatgcttcggcaaaataacaatttgcgtcgcgcacatgtgcgcatgaaattgctcgcgaatgatttgcagctgtcgaaagagaaactgcaggtacagaaccgccgtttgcaatatgacgcttatcacgattcgttaacaggcatgcctaatcgcctctctttctggcagaggctacaggaagtggttaatcacgtgaaaccttatcatggttgcgcagtggttatgttgttcgacctcgataattttaaagatgtgaatgatacgctgggacatgatgccggcgataagttgcttcaggagctcgccagccgcctgtcgtttttccgtaaaacgtctgagacactgtaccggcttggcggcgacgagtttgccctggtatcgcaggatttgagtgaggagatggcactggcgagggcggatgtgatccgcgagaaaatcagccagccgtatcatatctacgactcattgattaacatcggcgccagtatcggcattgtgatttccgatggtgaaagtcgcaccgattacctgtacaaatgcgccgatctggcgctgtatgaagcaaaaaaatccggtgcgggtaatgtgcaggttttccgcgatagtatgctgcagcgtctacaggagaacaaatctttcgaagacgatctgctgcatgcactggaaaacgaccagttcaaagtttactaccagccgatcgccgacacagtgtcgcgtgaaatctacggttacgaggcgttggtgcgctggtttcatccattgcgcggcatggtaccgcctacggaatttatcccggtggcggagaaaaccggcctgattaaccaacttggcgagtgggtgctgaagaccgcctgtgaggaagcggcccgctgggagcaaccgctgaaagtttcggttaacgtctcaccgattcaacttatcaatacctcactcacagatacggtggctgcggtgctaaagaagacgggcctcgacccgcggcgccttgatcttgagattacggaatctgatgtatttaacgaaaatacgcgctcgctggagatcctcagccagttacgcgagcaggggattcagatatcgattgacgattttggcaccgggtattcgtcattgtcacggttgagttatttcccctttgataagatcaaaattgatcgctcgtttgtgatcaatatacctatgcaaaaagatgacctcgatatcgtgcgcctgatcatcagtatggggaaaagcttacatatgcgcattgtcgccgaaggcgttgaaaccgaggagcaattaacctcgctgcaacaattaggttgcgatctcgtccaggggtatttaatcggtaagccgggactgttaaataacaactgaaacaaaataatcctcagtctttaaactggcgtcggtgaactatcactggcgcttttttatattttaaataacgataatccgtaatgggtataaatagtggtagataaaatagattcgaaaaaataatacccttagcaattgaaaggggtatatgatatgcaatatatcgttccattcgtggcgctatttcacgacgcgaaaagagaggcaaatcatgcagcgaatcattataccgacccattatgttcagacccgctccactcccatgtggaccaaagagactgcgcccgcgtctatctggaagcgccatcttgatgccggcacgcgacaaggcgtttacccgcgtttgtcagtgatgcagggtgcaatacgctattatggttatgccgatgaaacgagcccaaaccctgttgaaacgatgactattgaagcgggacagtttggtgtcttccctccggaaaaatggcactgcattgaggcattatctgacgataccgtatttaatgtcgatttttacgtcgaccctaaaattctgattgagggataagttatgtctatgaacagtgaaaataaaggttattcattagcgatagtcaataacaataataatgaaaaacgagagaaaatttatctgaagccgatggcgctttatgtccctgatatcgcggttcaggcagtagcggaattgcttcaggatctttcaaccgataacgcgcaggggaaagggttcagcctgatggtgacgaacaataataacggtgtatcggtagataaagattttgctgcaatcgaggcgcttcaggatccactgcatgccgctgatgcagtgaaagagctcatcaatattgtgcgcggttatgagtctgacgaagagactaacgtctgcggttggtaaaaattcagtcaggcagatatcgtccgatatctgcctctttctctggtttcaactcatcgctatctgctgcagtaaccagtcccgcaaggcgctgatatcggcgcgctgggctaactcttgtgtcgccaccagataatagtttgctcccggtaagaacatttcaaatggcgccgctaataccccgcgttgcaacagatcgcgcgccagcagttcgctggcaatcactacgccttgtcccgccaccgccgcctgtagcgcatgcgtctcgtcgctgaaggttaacccagcgtcgatattcagctgcggtggcccgtagcgacgttgccaattctcccaacctggtgaatctgccggaacgtgacgatgttcaacgtggaacagggtcgcgtgacgcaaatcctccagccgtgtgatacccagcgtcgggctggcaacaacgataaagcggtcttcatgtagcaaggtacagtgcagttcgcgctccggcgtttcacgatagcgaatcgcgacatccacgctgcgctggttgagatccatccgttcgacgctggtatgtagccgcaggtcaatggcggggaattccgctttaaatgctgccagtcgtggtaccagccagtgagtcagaaagttggaagtcgtggtgacggtgagcgatggcggctggtgtgagcgaacaatttgtgcggtagcctcttccagcgcgctaaaggcgcgttgagtcccggcatagagaatttcgccgctttcggtaaggctgacgcccagagcattgcgttcacagacccggcactccagcacagattccaatagtttgatctgatggctcaccgcagtagcgctcaccccaagcatatcggcggcgcgtttaaaactgcggcagcgggcaacggcatgaaaggcgcgtagagcccgaggggagggaggcgggtttttctcatggctgagtttttctcatctattgctgaaatctatgcgtttgtgtaggtaattatacaggcggtagtctattgacatgtgaaataagcgatgaatttaattcatcattgtttgagaatgtcaggagtgaaaaatgagtgttttcctgcatacgcgtgctgcggtggagacatccggtgctgaaccgcgtgcgcaagcgatcgcgctaagcagcctgttcgcggcaggcgcgctgttattgaacgtttccgccattatcggcgctatcgctagtttagtattactactggcgctggcgggagcttttgctgttggctatgcaatcgcgcgttggcagccgtggccagcgcattattgcgtgacaatatcgtgttatgcctttgtgctgtccgctataggttggttactggttctggtgatatggaatagcgaacgcggttggctggatctcattccgggaatcgtctttggtggattagggctgggcattgtctggcaaacccatgtggcagaaagaggtttgccggggatgatgccgaccatcccgacaatagcgagtattgtttttattaccctggcgattctgctaactaatcactatgccgattcaggaaagggaggctttgtctacgctctggcggtgctggcggatctggcgttgttgggtgcggcgctggtgaaaatcaggctgcaggaaatgtcgtaaatcggcgtgctatttgtcatggaaaatccaacctatcttctacgctaccggtctgcatgagcttgtccactggagtggtggcaaaaaacgcctgaaccgtgaaatgaaagggaagtttggcagtgcggattatgcagaggaagaactggtggcggagctgggaagtgcctttctgatggcggatctggggattgatggcgaagtacaacatgaaagctacattgcttcctggctgaaagcgctgaaaaacgacaagcgctataatattgactcgtaatacggatctgagcgatatatacactgagaatgtactacttcactgtagttttatacgataaaggggagccacgctccagcgccgtttttagcgtatcaccgctgagatgatcggtgatgccatcagcaattgcccattcctcaaatatagacaagagtttgtaaggttgtttcaccagaggtcgtatattctcattatgatgacaggctaaccagaacagccgggataagggcgtagatattctcgtcggagataacgtggagtttttgtcaatggttagcttttctattaatctctcgatttcaatacatttgataacgaaacaagcatcttgtggcaagtcatgcattgggaagtagcatggaaccgtatattcccgcttttcattccgccaggaagactccttgattatagaggtggcctcatccggtaagtattttatcttgctctgaatttgttctttccatgatgttttattgaaaagcaaaaatagatcatttgcattcgtaacagtaattccaaaattaatggcgtaaggattgttaataggtggtggtattctgagtgagtctgctagatacctttgaatgataatgtactcaaatccaaataggttagtatcaaaaatatttctgcgagatgaaaagtaatcaccttcagtagatatgataatattcctattatttatgaaacactgcttatcaagaaaacagagtctctttagttctgaattgtccaaagtagatatttttaccttttctccatttttagctatttttcgtaatattaccgaagactggaagtaaatggatagattgatttgcccataaagtgcacatcgatatatggtactttctgtaattgaggtgtcgaatgtctcattaatcacttgcacagcttcgtgtattgttaaccagttttttgccataagcttgagattgctattccaggacatgaataattttcctttatttgtttttttttggtaattatctgatgctatatgttaattgattgctatcaatgtgcgacatactccagtatttataggcatgcgaggttcagaaaaataaattatcttattgatgtttcttctttataacttgtaagtggctgtcaccaatggtgcaagggaaaggggctttatcggtatatatcatatccgttaatttcagccatgctctgttgtccagagtcagaatccatctaactctggatacgttttcaccaatgataacttatccctgtatcaagtttatctgcacagtcaatcccggtagggctatttctgacgttattaaatttataatctaaaaatatctgcatatttttgttgaagtagtagctaaagccgatttcttcataatccagcactcgggttcgttggccagcgattgtttgcgtcaggtgagtgtaaccaatgctgggctgaagtttgtcggtcagcatatatttagccagggcttcatagctgaaggcgttggtattgttactgcgaggttgggggttaatagcatcattactctgcgtgaaaacagtggccagataaagttttttgctttggtacttaagcccctcagctaaagtccgaatattttttttgtaaccggcattttgttgctgtgaaaatgtagtctcggaagatgacgcagcaaaaagtgcactgagctttggcgtaaagaaccaggacagggaagtaccaataccattgccgttctgttgtcttaaagctcgatttccgttgttacttttgaactggtattgcattgctaatttcactgtctgttgaaagaccgaaagatttttgcgccacgtaacaaggttaagggctcggccacgcatgaagttgtcaatgtagttataagacatttccctgaataagggagagcggtcggttattgaggttacgtcgtacagtacccccagttccggccgatatccaggcttccccagtacggattgtctacacccagaaacgcgagccgtgttgcatttctgctggcatctgatgcactaaccgtatattcccagtgagcgtaggtttgccagttgtgggtaaggtcatgctttccaatcaacccaaaatatagatagctacgatcgccatcatctttgatgttattactggtaaaacgtctcgcaatgatagtgccataaaaatcgagacttttaccgtcctggttcagaacgttgaccgcaaaagagtacggtgagaagagtagtgtgattgatataaaataatagcgtaggtcatgcaatgtcatgataaacatccctaaagatggctcagcatctgaatggtggtagggtggacaatttaccgagacatatgctcattgcttaaatccaatagaatgagattattatcgttatgctgaaacgttttgtttgtggctaaaataactgatgatgccattagaaatggcggatgcaattttgttgcggaatgccgttgtgcctaataatttctcctcctgtggattggtgataaaagaggtttcaaccaggacagatggaatatagggtgatttaagtactgcaaaagctgcctgttctgtatggtttgaatgcatatggtggactggagaaatgtggtgaactatatgtgatcccagtaaaagactttccctgatggtttcagtctgttcaagatcgaagatgattttgtcgagatacttgtccctgtgaatgatttgttttccagcaatattatcagcagcattctcacttttggatagataccttgccatagcgctgctggctccccgtgttgaaagtgcaaaaacggaagctccatgggctgcaggactagcgaaaccatcggcgtgaatggacataaatagatcggctttgtgtgcatgagcaatctgtacgcgatcgtatagtggaataaaagtgtcatccgatcgcgtctgtagtgcatttataccgtggctattgagaatggcttttatcttaaaggtaatatccagtacaacatgtttttccagagaaccttcacaacccactgcgccagaatcaatcccccgtgtccaggatctagcattatcgtaaatttcctgcgcccatttattgggagggaggtatgcttatgatttagctgaggtcgtagatgtgcgtatgtaagcggtatagccagtgtattggttgcgagagccgctaaaccagtaagaatcagttttcgtcgggtaatgttggtgttcaatgctgccgcctcatacagattaatttgttatgttataacgttatgaattatttgaggtcgaggacttgaatgttattttttgttgcttcgggttacttaatattaatcactggaaaaacaggaggctcccaatgtattgataaattgaatttttaatacctatcactgcctcttatcgcttgaatcatgatgacattaggcgtccaacaatgatcgcaatctgcaagagtactgctgattagctcttgccccgtcgtgtttacttaaaatcctgaattatcaatcaggacgatggactcctgctggaaacatattgatatagatcttttcaaaagataattattctcattactgttggttatgttataacgtaacaattgaaggtgtgccgaaatatagaatgagtctatccattgttcgatgacttattctggggaggaattatgtcaactgaacatatcaaagaagaaaaactcaacatcggtgccgtgctggctgtatcacttagtacagtgattgcgatgctggacagcactatcgcaaatgttgccttacctgttattggcaaagatttcgccgtctcagaagctgcatctatcctgataatcaatgcttaccagtttgctgtggtcgcttcattgctggtattcgctgcattgggaggcaaaataggtaacaaacgtatttttattcttggggtgattttttttgcgctttcctcgttaggatgtgcactttctgaaacgctgatgatgctgacggcttttcgcgtcattcagggctttggggctgcggccattctaagtgtgaatgcggtgttgattaaagagatctatcctgcccggctgttaggtcgtggattggggattaatgtaatggtggtgtctgtttccgcagcggcgggtccgtcaattgcttcagctattctatcagttgcaaactggaactggttgttttctattaatgtaccgatcgcttgtatttcattgcttctctgtattgtatcgttcaaaccgacacaacgtaccgaaaaccggtttgataaagctggtgcgttgctggttttcctgacgttcgcttcgttttcaacgatgatgctgggtctggcgaggaacaacgtgttagacgttatcccaagctcgattattcttgtcgtgctggcaatcactttgtatttgaaccaaaaaagaaaggttactgatgctttgatcccggttgcgatatttcgcaacaggacattttctctgtcgttattaatgtctttgttatcatatagtacgcagttactggcatatgtctccttaccattttattttcataatgtattaaaccgcaatgtcgttgaaataggcatgctgttaacggcatggccgctggcgacaatgttgacctcgctggtcgcgggtgaactaatcaaaaagtacgagcccaacctggtagcattcaccggactattactacttctgataggtactctgttaatgacatggctacccgtacaaccctcgaatatgcagatcctctggcggatcgctatctgtggttttggttttggactattccagtcccctaataattttctcattatgacttcggtcccacatgaaaatagcggtattgccagcggattattaggctgttcacgtctgattgggcagattattggttctgtgctggtggcgtttttctttaatatgtttgggcgtaatgtaacgaatattagtcttttcgccggggcattgttctcatttatgtctctggcggtgagttatctccgctttaaatcttcatctcatgacgtcggttttttaaagaaggtaatatgaattagtcaataaaataatcacgtgatgctattaaattacaattcatttaaaacattgaggtgctaagtatgcttaatggaaaaatattattctcattattcatatcatcgatgatattattatcaacggcaagctatgccaatagtagtgaggcgagtaagacgataaatgaccaaaatatgaaaaattctgaagaaatacccataaaattcaatcgcattattatcaccggaaattgtccctttggtgtaattatggcaagtgatttggcatataaacatgtagtgggcgttggaccttgggcttttctgcattcaaacatgaaactgctcaaggatatgaagccagatatcgaccgtatcactactgactttattaataaagactatgttgtaaatatggaatccttactaaatttacaaccagatattatttactattatggtaaaagtcagaatgataatctggagcgggcagggatccccactataaatcttgatgctggtggtgacacgaaatttgagccagtagtaacgcagacttattgggaaaacgaatttaaccagacccttggtttacctcacagtcacaaattttcggatgcatggaagataagcctcaatgaggcaaaaccctatgccgagaagatcaaatcacaacatattcgggcattgtatcttgagcagagtgatgggaaagaactcaaggtgagtgggccgaaaacatatggtgatacctatcttaagatggcggggatggaaaacgtagcaagtgatctggtggtaaaaggggatgctggcaggtacattaatgtttcaatggagcaaataattcagtgggatcccgatattgtatttgtggtctttggtagcgcgaaggatattcttaacaataaaaattccgggcaagactggcataatgtaaaagcattcaaagatgggaaaatattttccacgcccgtggggctacataattggggaggattgtctgctgagactgcgctattaccattgtttatgattaataaatttgaccctgactatataacagatgcagaattgaaagttgcaacgcggttacactataaaaaagtatttgattatgaaattccggatgcgctattaaccgatgagttaagacagcggtaataaaataattcggcgcacaggtttttattttgaaaggttagttatgcaggaaatacaaaaataccgcatgctaatgtggattacaatcgtattgttactgattgtggctatgatttctttattcataggtcgctatacattatctttccccgaaataatgacggaggtattacatgataatggtcgccgttgtttgagcgcaggattctcggttatatgcaatctacggttgccaaggattattgctgtaatgatggtaggggcagggctatcagtagcaggcgtgacgtatcaagcagtgttgcgaaatgcgctggcgagcccggatgtgctcggtacatcttccgccgcagcgttcggcgcagcacttgggatactgctaggttttccattacagctcagcgctttttcctctttcttctttggaattgtcagccttttatgcgtgatgggactttgccatttcaagaaaaacaatggggaactcacgactatcctgtcgggcatcatagtggcttcggtgtttatgtcttttgtatcaatcattaaatatgttgccgatccacaggacgaacttccggctatcgtcttctggcttatggggagttttgcttctttggtcaaagagcaggtttatggactcatcccgctttacatcgtttgttatctggttatctacaaacttcgatggaaaatcaatgtgttgtctctaggaaatgatgaggccagaattgctggaatgaacccacaattgttgaatgcagttttgctaatcacagcctcaagtttggtggcagcatcagtcaccatcgctggcgtggtgggttgggttggtctggttatcccgcatctggttagaacgctggtcgggtacaaccatagcaagctgatcccggcttcggctgtatgtggtgcgttgtttttattggtcatcgacaacattgccaggaccctgacttacgcagagatccccattggaatacttactgctctggttggtgcgcctttatttgctgtactgttcatcatgagtaaccgatatgatcgaagtgaataatctgacgttcgcgttcaaaaagagtaaaactgcctttaacaatatcagcttctccattgatgaaggtgaggtactgtgcgtattagggccgaatggtgttggcaaaacaacattgcttaaaacggttaccggtctgtatcaaccggttagtggctcatgtcatattggccgagtgggaaaccggaaagctcgtatggcgtatgtcccgcaggccaaacgtgttcacttttcttacaatgtactcgatttcatctcctttgggtgcccattacggggcggaatgctggcatctcctgggcgagggatatcgaaaaagcggggcaaatattgtcgggacttggtgcttcatatcttgcaaccaaagacgttaaccagatcagtggtggtgagctacagatgtgttatatcgcgaaggcgctggtctcagaaccggacatccttgtgcttgatgaacctgaatcaaatcttgattttaataatcagtctctcattattaattggttgcacacgttgtcgcgggagaaaaatgttactattatcctgaatacgcacttcatcaatcatgcaagtaacattgcagataaatgtctgctaatgggcaaagatagttactgttttggaactacacagagtgtcttacaagaatctctcctcgccgattatttccacgtccccgttaaacgttgtcattttgaatacaacggaatacagaaagaatcatttattgttgcattgtgaaaggtagccaatgtcgcggtgagaacgagaaatgagcgattatgatttaagcccagttgggctttacgaagctactggtattaaaaattataatatgtcgttctgattgaataacccgcatgcgccaagtgaatctacgacgcagcgttttgttttttgctggagaaagcaaaaaagccgcatcagtctgcactgatacggctttgatttatcgggactattaaatcactagccagctagaagcgtcgtttttcctctccccagtatgtagggcggtacataggatttgcggcaagtatccagataatccgaccaccactgcatcattgcctttctggcttccagatgctctgccctgtgaatatatgcttggcgcacggagttacgttcctggtggctcatttgccgttcaacagcatcctgtgaccatatactggactccataagggcgctgcatgccattgtcctgaaaccgtgaccgcagatttccattttcgtgtcccagcccatcaggcgtagcgccttgtttactgtattttcacacatcggtttatacgggttatggtccccggggaacacgagtgcattatctcctgagatatctttaatctttttcaggatcgcgatcgattgttgtgagaggggtacgatatgaggcctgcgcattttggcaccacgaccagagtaacgcacgccttcaatagcttcgcgcgtggcgggtattatccagacctggtttccgaaatcaatttcatgccagcgggcaaaacgcaattcactcgagcgaatgaatagatgcagtgttagcaggatggcaaggcgggtgagttcacggcactgctgaaagctctcaatgctctcaagcaattctggaagacgctccagcggtagagcggggtagtgacgttttactggcggagccgtcactccgtccaagtttgctgccggattaaaatcgattaatccatgatgcacggcgtagcgcatgagtgctggcgtgtacgggatgcaacttctagtagacccttttcctcaattccttttaataaagtgatgaagtgacggggtttcagttctgaaactgacatcgtaccaatgaccgggaatatatgattattcatgctggcgagcagacggtcggcggtgttctgtgaccattttttattgctcttatgccacgccagtgccacgtttttaaacactttctttggtatacgagaactgcgttcatctgctcgctgctctgctggattgatgttcagtaccagcattttgcgaataccttcacgttgactacgggcgtctgagagggagatgactgggtaggcaccgagtgcaatacgggattctttacccttaatacggtacttgagataccagtgacgtgaaccgccaggtttgaccaggagatacagaccgtgggaatcggaaactttaaaaggtttatcagatggtttgagactgcggattttggtgttggtaagagacatatggggtcactccataatagaacgaaccggaccccagatttgaccaccaatttttcccgatgcggaggataaaatcaaaatgcatcaggagaagttttcacgctaagctgttgtattaaaaccatacaggcattaatgaagctgcacgaaaacaagaatctggctcctctgactggactcgaaccagtgacatacggattaacagtccgccgttctaccgactgaactacagaggaatcgtgtgaaaggggcgcatgttaacgagtgagttgggggatgtcaaaggagaatacgtcatttgcgatcgttcgttggtaaaatcagcagtagcggcgatttttgcactatttaagcgaaaatttgagcgaattcagagggatgaaaagctaaagttgcggaaataaaaaggcctgcttgaaagcaggcctttttgaatctggctcctctgactggactcgaaccagtgacatacggattaacagtccgccgttctaccgactgaactacagaggaatcgtgtggagtggtatcttagcggcgaaaaaatttttgtcaaacatcaattcaactgcagcgtcgcgcctgccgcatctatcaacaatttgtcgtatttgccgacaatttaccaggaaaaatactttgcaggattagcatttctcaatcatcatttgaaatgttgtttcaactcttctcactaaggtctcccttgaacgtcacttcagcagtacgccaggccgtagcgcgcacgtcctggtttaaaaagcgcaagagctatcgtgtgctctactggcgtgaaatcagtccccttgccgtaccgatcctgctggaaaacgcctgcgtattattgatgggcgtgctgagtactttccttgtaagctggctcggcaaagaagcaatggccggggtggggttagccgacagctttaatatggtcatcatgtcgttctttgccgcgattgaccttggcaccaccgtagtagtggccttcagcctcggcaagcgcgacagaaaacgggcgagggcggctgcgcggcaatcgctggcgatcatgaccttgttttcaatcgtgctggcggcggtcattcacgcttttggtcagcagattatcgatatcgttgccggcgacgccacagttcaagttaaagcgctggccctaacctatctcgaactgaccgtgctgagctatccggcggcggccattgccttaattggtagcggcgcgcttcgcggcgcggggaccaccaaaataccgcttttgattaacggcgggatgaatattctcaatattattatcagcagtatcctgatttacggcctcttctcctggccggggctcggctttgtcggcgctgggctggggctaactattgcccgctatattggcgcgttggcaaccatctgggtactgatgacaggctttaacccggcactacgtatttcgctgaagagctactttaagccgtttaactttgccattatctgggaggtgatgggcattggtatcccggcgagtatcgagtcagtactgtttaacggcggtaagctgttgacgcagatgtttgttgccgggatgggaaccaacgtcatcgccgggaattttattgccttctcggtggcctcgttaattaacctgccgggtaacgcgctgggatcggcctccaccattattaccggtaaacggctggggaaaggagaggtcggtcaggcggagcgccaggcctggttcgtgttctggctgtcgactattattctgacgcttattgcctggggcaccgcgccgttcgctggcctgatcgcttcgttctacaccagtgaagaagacgtaaaagtggtggttaaagagttattgtggctcaatgccctgtttatgccaatttggtcgctctcctggaccttaccttgcgcctttaaaggcgcgcgcgacgtgcgttacaccatgtgggtgtcgatgctgggtatgtggggctgccgggtggtagctggctatacgctggggatcatgctcggcatgggcgtcatcggcgtctggctgggtatggtgctcgactgggcggtgcgtggcctgttgttctatcgccggatgatcaccgggcggtggttgtggaagtacccccgattaaaggctcggctggaagaaaagacatgaatatactgaaaaaacgttactttttaggcgaagtgaagaataaatcggcaaacgaacaccattataaaaaacatctttgacatggctgagcgtggtcgctaatattcgccccgttcacacgattcctctgtagttcagtcggtagaacggcggactgttaatccgtatgtcactggttcgagtccagtcagaggagccaaattcagaacttcatgaagtcagcttcgtgaagttatcaaaaagcctgatgatgctaatgtatcatcaggcttttttgttttactggtcagatggggtcatcctaaggtattgagacaaaccacatagtcaggtttgtctcagcaggggattagggttttagtaaccgggtaaccagcgcggcaactttatcgttgtggctatgggcgatattaaagcgcatatagcgtagcccttctgctttttgacaaaacagcgtacctggcgccagagccagaccctgcgctaatgctctttctgccagcgtttcactatcgatatgttcaggcaattcagcccataaaaacaacccgtaagaatggacgaccgggaaacgacaacctgcttcctgaagccagttttttacccgcgaggagacgtcactcaaattaccaataagccggcgctgatggcgattatagctaccgtcacggaagaattgatgtaatgtctgctcggtaaattcacaggtgacgccgccagtctgctgttttagctgtactaatttttcagccagcaatgggttcgttgcaatataggcaacccgcatattggcgctcagcaattttgagaagccggatatatagctggcattagtgagtccggcaagcgccgacattggtttggttgccggttccatcaggtcatgataaaggtcatcttcaatgagatgacaatcgtagcggtttaatacggtgattaaagcaaacatctcttccagactataactttgcccggtggggttgtgcattagtccggaggtgagataagccctgggtcgggactcttttaataaggtttcaagctcatcaatatcaacccctgtatgaccgcgagggataaagacaacattggcctgatgctgactcaggctggcacgaaaattgaaatagcaagggtcgtcaatcagcacggtatcgccaggtttgatcagaatacggaacagcatgtcgatagcattcatggtgctattcgccataataatctgctcaaccggtacgctaattcccgcctcattcattttcatctgcagtgtttttctcaatggcaggtatcctcgtgggttaccgtactcagagaattttagctgcggtttgcggataatctggcgtagcgctttacggaaaaactcagtatccagccactcttcaggcaaaaatccgcatccagggcgaagaatgtcgctactttttgcaaaagcgtgtttcagtcttgaatgcagatcggggctgactaacgaaagaggcttgtcggcgtcaatctcagtcgtttgccgtgcatggctgacaaaatatcctcttccctgaatagaggtgatcagtcctctggcacgcaaacgttccagtgcttccacaacggtaaatttactggtttcaacctggtcgcagaattccctcagggaaggtaaacgactgcccggtaataattggccgccgatgattgccgcgctgataaaatcaacaatctgggtgactttggcagtgccattcaccagttgtagttgggataagctaaaaatggggctacctctgatacttgccttgactcttcgaactgtaccggagattttacctgtaaggaaagcgaatatttcgctaaacattctatgaacagtactacactatcgcgatatatctttagcccatcaattgtggttctgaagatgagtgtatgacagcagcaaaaaataacttttatttattatttatcaaaaggttgggtacgtcttccgcccagctattgttactacggatggtctctgcaattgccctgttttccctgctcggacaggccaatgtctggttagacacgaccagtaatgccttactggcttttggttatcggtttctgttgatattgaccccattgacgctaggtctgtttggtcaacgtgcattaatagttactctgtcggtgtcgttgctgggaatagtattattagcactgaatgttgcaccgggcgtcaattggctggcggtggtcctctttagctatggtgtcgccgtgctgggttatatcgtgaagaatgatgcggccagaaccccggcaggagcggctaataataaaattatgcttaatcttggcagtctttgtgccgggttattattactctatccgcactggagtccattattattttatattgttattgctgctttattgctcgtttgtttaccaaccgcacgtcattttagcttatcaagtgacttgacggcgcaggcgctactgacgaagaactttgctaaatcaggaaagctgaaatgggtattagcagggattgttactggggttaaattatttgcggtattctctatcctgccgcaggagattctggttcatcgacagactctaccagcctggtatggcatgatgatcatctttaacagcgcaattgttgcattaatacagatgccattaatggcgcttattaatcgcagtggcgataaagcaatgctgatgtcgatagtgattatactccttggcttgatcgttttggcagtgcctggcatttttcatgtttatactttttggggagcagctgtatggctatcaatattatcaattgctgaatgtgcattgagttatattgattattgtgcggcgcaagaaaattctctgttaataaaagagttgtccgtcagtcttggcgcaggattaacggttctggttatgcgttatttcccggtggcgattaacacagaagtgctttctttaatttctattatcgcattattactttggctgtggaaatataagtactcatcaaataaatcctataaggaaaatatagatgccgtcagtgatgtttgtgaaaagtgaaactgaattcactttcagggatgtggtgagccttttagaatgcagggagaatatgaggtttggttgtaaaactggaaactgtgggctgtgtcgagtcaaggtattatcggggatggagaatatcacgggcaagactttaaaagagaaacgtttattcaaattgcttggtatagaagatcaaacggtgcgactggcgtgccagtgcaaaattagcggtgatgtcactttaattgaaaattatctggagtaatgtatgaaaaatcgtattaaagacacgtctattgtacgtaatgaaccttttctgaatgcagaaaaaagtgcgcaggtaaaacgtgaaatcgacgactttcttgataccaaaatcatcgagtgggaaaatacggttccttcggcaaaacatcttgaaggcaaagaaattaacaaagcgtactatcagcagacgttgattgaacatgcatggcgtattcgcctgatgcgtagcgcgcaggctaatgcgttacataaaatcacccaatttaatgctgaagccgcacagctctacgccgcttatcaggatgaagagatgcttcatgacaccttgttcattcaggatgctgagagccagggtattagtaaagagactatctatagcactgaacctagcttctatacacgtcttctcagcggattcctgtactttgtcgccgagcacgaaaaaccactgggcgtggtctgctatagctaccttgtcgaatacactactcaaaaactgacgcccaaacagattaaggcactaggtgaatctctgggtaaagataagattatcggccaggccgcacatttgaatactgaccttgtagaagatcatacccaggacatgtggaatattttgagcctgctggtggagtctgatgacgatattcacgatcttaaacgctatttctctgaaattcaggagttgctgaagttattctttgttgaattgcataataaaacaatcaacgcataaaaacttataaaaatagtcacaatgcaattaaggttgcagggattgctgcaacctgattattaaacgacagagttggtggggcagtgatgaacaaagcaattcttattttatcacatcaattattatcgatggtggcgcctataaaaaagatagttgaggataatggctatgcttgctacgtcctctcatctacttcaagtaaggcgacagcaccgcagtgggaaattgatgaaaaacaatttagcattacttcttcattatatttagaaaaagcagatattgatctttttttgcaaacgacgggtaagaatgtcgattttgccggatgtcttagcgtatgggatggttatcgccacttgatgtcttatgctaatcacatttttggcgccagggatattagcgaagaggtggtagccaggctgcgcgataagctcgttatgcgccaggtattacaggccgcagggctaacagctgtaacaagccaggttttaaatgaagcattatttgaatccataagtcaccctgaacagtattttattaaaccacgtattggtttagcgtcaatgggaacatttcctgcaaaatcattgacggaatatgctcaactcgaacacctgtggatgcgtgcagcggaagacaaaaattatgaaggcattttttctcgcgataatggctttattcttgaaggctttatctccggcgtagagtgcagctttgagatcgctatagataatggcgtaatggatgttctggctgttcacgagaaacttgacgtgacccaggaaacctattctgtactggagggagcctgtatctgcccgccgcgatcgttaacgacggcgcagttggaagagggaaaagtacgtctggacgaaataatgaaagcgctcggtgccgataccggtgtttatcatgtcgagatgaaatacgatccacaactgcaatgggaagtcgtagagattaatccccggattggtggggcctatattgttgatagcactaaaattcatgccggagcgtgcttactggaaacctggctgatgttgatcctggggatgaaccctgtgcgtagtgctgcgccggctcgaacgacatttttccgcgtgttctttggccagtcagggaaaacgctgctgcgtattcaacgcagtactctcgaattacccgcagtgcaagaaaaagtgctttataaagccctggataaattaccttcggtggaacgagaaatatttttaggtatggcgttgtgggatattaccgatatggcgatatctgaacatcctatattttttaagcaaaccaacgattatctgattacggagtaccagtaatgaaaatagtcatcttgcatcgtattccatttgaaaagatccgctacgatcagattatcgaccaccaactgcatgaggtttattatgtttgcctgcaggggaacaccgatgattttccctccgaggcgaaggttatcatgctggagagtcagtattttgaaccagctgagttaattaatttttatgcgcctgtgtttgagtatgccgatcgtattatttctcgctccgaatacgatctgcttgccgcggcgaccttgcgggagcatttttcgattagcggcgataaactggctgagattcttcctttgcgtaataaatggattatgcgcagtcgctgtaaacagcaggggattcctcagcctgagttctggcatcctctggaatttattcaactagcgcctcgtgagggtaaattcgtgcttaaaccacgaactgaggcttccagcaatgggattatggtgggggatttcgcgactatcaaacaggcatcgttagctcttaaggatgatgaaacgatgctggttgaagaatttattgatggcgttatttaccattttgatggatggatgcataaaggaataccactggctttcgtgagtagtcactatattcgagactgtttaagctttgccgatggcgtgccgctgggatcggtacaaactgctactgaagccgcgcatatcgatttagtcgttaacgccctgagtgtattaggacaccagaatggcagtttccattttgaggctattcgagatgcggaaggtaatttctggtttctggaagttgccgcacgtgttggcggggccggagtggctgaaacattccagttacgtacaggtcttaatctttatcacgctgatttacgttaccagttgtttggtaatccgccagtgtgtatcgatctcattaatgctgtctactatggctggttcgtctatccagctcacctgcttaactctgcttatacgctcaacttttcggctgaggagtggcaggaatatctactgcattatcaatccaatcaggatgtctcctcgcgtggcacaatttcttactcgccgacaacctcgccattgagtggtgtggtttttggcgagcaaacgaaaatcgcaagagtcattgagtcaatttttaatacctgcacagtggaagctatatcatgaatacgccatgctttattgtcgttggatataataacgtcagaatttatgatgttgctaaaattcgcgttgaggcacaaaaatattttgacgccaaagttgtattaattactgagaaaaaaacagcaagcgatgagcaatttgctgatctggtgattgaaacaacgcttgaagttacacaactcccggcctcagcggatgtcgttcatcaatatctggcaactgaatcactctctcccatcggtattttaccattttccgatcgaggtgttcctttgggggcgctgctggcgcaaaagaacgcgctatccggcgcgctgccagaacaagcaaaagcagggcttgataagcaaatattccgtcaactggatgccagggcttcattccatcccgccggttatcggacggtaaccagtcagccggtagcatcattgaatgaacttaaagatatggtcgattcgttaggcggtaaggcctttatcaagccagcgaaggagggcaatagccgcgggtgccaggtgattgagtgtattgagcaatgcgagtctatctgggcttcactggcgccttatcgcgaagcagggatcctggtggaatctcttatcgaaaatgcgaaggaatttagttgggatagtgtggcgggtaagcagtggatcacggaaaagcatactactgaaggccactaccgcgcggagtatcaacaggtggtacctgcctgtttgaccccggcggatgaaatacttctgcgttctgcaggcgaacatatgcgtgaactggtgtcgccgtcgaatggcgcctggcataacgaaatatttttacttcctggcgcgacggccgctgttgaaaccaatatgcgcccggccggtatgcatatttgggatctggcgatgttgagctttgaaaatttcaatccatggctgatgtggctacgttgggctgcggagggtaaatatacggctgagccactcaaacagaactattactctggtattcgcatgcttcgggctcgcgtatctggaaccttgcaggcattaccagatgttgagcaattggcattgcgggcgggtattacgcttcatgaagtcagcttttcagccaaaatcggcgacatccttaatggcgaaattaagacgaatgccgattttattggccatatcattttgcgcgacagtagccatgagcagttactcaattcattagagacgctggcggcggctattgagtctgccactgaaattagctaagcgcgtggagtacaaatgaaatcctcttttatctggcacgataaacgtagtctgaactatttgctgtcgttgttcatattcagcctcggcagttttattatcaatccctactatgccatttatgtgtcagataatttaggttatggcgtggcatttgccggtgttttggtctcaattaaagtcatttcacagcgcgttttcgctttatttggcggcagcatggctgatatttttcctgccgtttatgccgccctggccggggtgggggtgcgcgcgctgtcgtttgcgcttctggctctgaatgcgaatcatgagatcctgctcgtttctgcggtgatgaatggtattggcggggcattgtttaaccccgccattcgtaagttattgtttacacgctataaagaagatgatgtaaagttaaaacaggttatcgcctggcgtaatgctgcatttaatctgggggcggcgatagggccacttattggcgtatacttgattaatctggattttaaaggcgcttgcgttgcgattacgctgattcatatcgtcgtagggctgatgctgtctggcgcaaagcaggcgtgtcaattacggccgactgaggcggggcgccggtcgctgatagtcgagctctcggctagcctgtttaatccagcgttattccccgtttttgccctgcaatttttctttatgtatttttactctcatattgagtacctgttgccaatatttatcacccaccagtatagcgagtattttgttagcgtggttttcttcgttaataccttgttcgttattttcgcacagacgatatttagccgtatttttaatgaattacgtgccggtattgcatggggcgcgatggtgctattttttatctcgctggcgatactgtcaattttcccaggcgctaatccgatgatctatgggttattgatagtgctgggcgttatcgccttttcaaccggggaggtgattctgtctatacaggtggattatattgccactcatgttggcggacaccttaactccggaacgatttttggcgctatttcactggtggcggctggcgggttatttgcggccaacgccatcaacagcgtcatactcgagtactttgactttgcagttgtctggctggtgaattcgttaattgccgcaggcctgggaggcttttcattgtatcgatattatttatcccgaacgctggcttattctcgttagatttgcggtatacccgctttgcatgatgccatacaaagcgggtggatgaattaacggaacggcggttcgttgaaggtacgcagcttgcgggaatgcatgtggtcgccctcggcgcgcagcagatcgatggcgcggatccctatctgcagatgctcggaaatcgccccttcgtagaagcggttcgcttgtcccggcagtttgatttcaccgtgtagtggtttatcggagacacacaacagcgtgccgtaaggcacgcggaagcggtagccctgtgcggcaatagtggcgctttccatatcgatggctaccgcccggctgaggttaaatcgcagcgccgaggcggaataacgcaattcccagttgcggtcatcggtcgtcaccactgtaccggtacgcagacgctgtttgacctcttcgcccggcatgccgctaacctgtttagtagcgtcatacagcgcgcgctgtacttcggcgatactcgggatgggaatatccggcggtagcaccgcatccagtacgtggtcgtcacgtaaataggcatgcgccagtacatagtcgcctatcgactggctctcacgcagaccgccacagtgaccaatcatcagccagacatcagggcgcagcaccgcgaggtgatcgcaaatatttttggcatttgccgggccgacaccgatgttgatcaatgtaatgccctgaccgtcgttagtgatcaggtgccaggccggcatctggtgttttttccatgccagatcggaaatcgcctcttccggggcctcagtgtcggcggtgatccaaattccgcccgcacaggagagggcaatatacgggctatccggatcgaggatctggctacaaccccaactgacgaactcatcgacgtaacgagtgtagttggtaaacaagacatacggctggaagtgctcaaccggcgtgccggtatagtgcttcaggcgtgccagcgaaaaatcgacgcgacgggcgtcaaaatgcgacagcggataatactcggtggcgtggaacagaccatcggcggtttcatcgccaatctgcgacagttcggtggtcggaaaataacgcgttaatccggcgctcatcgagcgatccagcgtcagcgcggagccgtcaatcacgtaaggaaagggaatttcgtgctgcgaattgccgacgctaatatgcgcgccgtaatcctgatacagcagagttaattgttccagcaggtaagcgcgaaagagttttggattggttatggtggtggtgtagcagcccgaatgggtgaatcgcccccaggcgcgagtttttaaggctttgtgttcggcgccatcccacgaaacagacagttgaggatagacgaataagccttcagcacgggctatttcatcaggaaggatattgtggtgaatgtattcgccaatggccttacgcaacgcgttaaccgctctttcatactgcgcttccaactgggaaagcgcctgctccggggtcagactgacggccttctggttcatcattcgctccttttttcaggtctgctgatactaccgatagtatgctacagcgtgaaaatggcgaaggaaaattactgttccgggtaaatattaaattcattgataataaaagcttagccacccaggatcaggctgtctgtgcccagcgttcggcgctaaaattacttgcgcttaccactcttaatgtcgccgcgctgttattattgatgtaataaagcgcgttggggccaggcgttagcttatcgccttcctgcagtctgcattgattttcgatttcagcaatcaccacgatatgaccgctctggagcactacgcaagttcttgctgtagataaatttttccgtactttctttacccaccattccatttttttaccctggcttgttacactcggcatgataattgacgtgttatcgctttaaagacaactgaaactatccattggtttaatttacgtttagctcacgttgttaaatcttaactcggcgatgcagcgggacaggcaaataacacttatggctttgatgcggcttaacaagcttctgaatcaatctggattaagaatagtctcgctagccaaaaaaacgctggctgcggcggttattgtggtggtggtatttttcattggacgaatatatgaatcggaacgaggccctgcattgcagcgctggcatacctggtctggcgatgagatgaccgctgatgaaatcgaccgcgccaattttgccagctatctcaaacgggaagatgagatatttgccgatttgcggcgtgaggtgagcgatcgcctgtcagccgctgacaaaacgccgataaaccgcttttatcgcgacagcctggtctatccacaacgctttacgccagactggaatcgctcctttatactattgccatccggcaaaccgcgtggcgcggtggtattgctgcatggattaaccgactccccctacagcgtgcgctatctggcggaagattatcgacggcagggttttgtcgcggtggcgccgcgcttacccggtcacggtaccgcgcctggcgcgttgacccgcgttgattgggaacagtggctggcgacaactcgcctggcggttcgggaagcgacgcgacttgccggtggggatgtaccgctgcacctggtgggatattcgaacggtggcgcgctggcgttgaagtatgcgcttgatgaactgaccgataaatcgctggtcaggccgcagcagattatactactttcgccgatgattggcgtcaccgccttcgcccgtttcgccgggcttgccgggctaccctcggtgtttcccgcctttgcgcgcgcggcgtggctaaacgtcattccggagtttaacccttataagtacaattcctttccggtaaaggcagcgcggcagtcgtggctgctgacccaggccttacaaaaacagattatccaggcggcgcagagccagcggctagcctctctcgcgccggtgttaacctttcagtcggtgattgattcaacagtcagtacccgggcggtggttgattcgttataccgctatttgccggacaacggcagcgaactggtgattttcgatattaatcaggcggcgaatctacgggcgctgtttcgcccggcgacttattcggcggtgaataccttgttacctccggcgccgcgtccgtactccacgacgatcgtgacgaatgggaatgagcacaccctcgataccgtcgcacgcctgacgctggcgggacaaaccgccgaggtaacgcaggcggtacatctggcctggccgcaggatatgtactcgctttcgcatatcgcggtgccattccctatcaccgattcgctgtatggtcgcgagccgcgggagaaaaatcttagcggtattagtcttggcaccatttcgctacgcggcgaaaccgcgacgctgagcgtcggtcttgatacgttaatgcgcgccacctctaacccgtttttcccctacctgctgcagcggattaatcagcgtctaccgttggtctcagaacaccagaatgtgcaataccgtccgcagcgtaataccgatgagggcagcaggggcaacgaagcggaaaagacgcacaaatctggagctgacgccaaggaaaatgccgatgccgggtaggtcgaaggtctggatgaggagccccgcggaggcgttaatctgactgagcgtgactttgccctgctgcgccaactcggagataaccccaaaataggcagtaccgcccgccacacatttcaccagtgcgggcagaacgaagttttcggggatatgtagccatagcagcaccggcatcagcacgcgctgcagcatttcgatgacgccagccgcctgcatcaggccgacgatggtcaaagataaaatcagcatcggcacggcgccaagcgccagacggatagcgtcggctccggcgctattgatcaccgcaatcagcccgtgattattttgttcgctttccgggagcgcttctgcccggctgctctcgacaatggataacttacgcccggtggcgtaccagcagaccgctgcggcgcagagcccaccgacaatagaaatggtgatagcggccagccagtgcaggccgaacggcgttaagggatagaagacgttgccctggcccatggcaaacaccatcgccagggtagcggccatttgtcggtcagaaacaccacgtttatccataatcgccagagtggcgagcggggcagcaaagctcacgaaatttatctgaatcaacgcgaaggcgctcatgccagtcaacccaaagggttttagcagtggcgccagccagcgcacgatgatgtcgagcactccgcggacttcgaggtatttcattatgatcagcatgacgaccataatgggtaataaggtataaagcgctacgtcgacggaggattttcccgctgacataatgatgccgatgacatccatttatctatcactgtatgcaggtcaaatagttagcgccatcataatcccgaaggggcgaaatgaacagctagcacaggcaggtaagaacggtgccttcactgaagtgatattcgccgctgaactggctacctgcgggaaaggagtcgctaagcgttttattgaggcgtaacgtgaaacgctgctttgccgggtcgagtgcgactatggcggcagcatcgaaatcaaacatctgctgtacgcgcggataaagcgctttgaacaggctctctttggctgagaaagccagcagcagtgcccactccttatccagcccacaacaggaaagcagcgtctgttccgttctcgaggcaaacatataggcgctttccagcatgatctccggttgcagatgctcgatatcgaccccaggatgcaggccgtcagcctctgcggtaaccacagcgatggcgatatctttgctgtgcgagacgcttcctcgccaacctaccggccaaattggcgcgcggtccgcggcggatgacaccgattcgaggcaaccggattgccgcagcaaatagtgcgcgcaatagcgcccggccaggtattcggctttacgttttacgacggcgcctgtaagggaaggtgggagggcgacggcgtattggctgaagagtttgtcctgcaattgtgtactggcgaattgtatccgacagaatttcaaagctgggtctgcccgtagatagccgcactcggcacgctgaataaagggcaaatcgcggaaggtgtcggtaacaataaacatgcaggctcatctggtgaaacgaacgatgacgctaccttaacgcaagtgataatcgaagcagaaggtgtataaagcaaataaaagcaaaaagcctgctcgaaagcaggcttttctgaatttggctcctctgactggactcgaaccagtgacatacggattaacagtccgccgttctaccgactgaactacagaggaatcgtgtgaacggggcgcatattatcgatgacctaaggggttgtcaaaggctgaattgccattacgcgtttgactgctgacaatttcaacagttgtgccccttttatactgtttcgcccctgtaatgcaccatgatggtgcgtttatactcctaatggggcatatcatgcgctcatggaagccagcagtattatcactaacccttattttaccgcaccagcagggggatgaagcggctacgtaaaacctggcaagcatcttgcaaaatccctgtaacttaatggccagtagtggcattcccttacaggaggcaaaatgaacttaagacgactgaagtattttgtaaaaatcgtcgatatcggcagtcttacccaggctgctgaagtcttgcacatcgcacaaccggcgctgagccagcaggtagcgaccctggaaggtgaactggagcagaaactgctgatccgcaccaaacgaggcgtcacaccaactgaagcagggaaaattctctatactcacgcgcgaaccattttgcgtcagtgtgaacaagcgcatctggcggtacataacgttggccagacgctaagcgggcaggtggcaattggccttgcgccgggtacggcggcatcggcaatcaccatgccgctgttgcaaacggtgcgtaacgaactccctgaggtgaatgtttatctgcaggaatgtagcggcagcgtattaaacgacaaactgcttggcggccaactggacatggcggtgttatacgaacgttcgccggttgcgggagtggtcagccagccattgctgaaagaggatttgtatctggtcggcacgcaaaactgtccgggacaaagcgttgatctctcggcggtggcggagatgagcctgtttttaccgcgcgactatagtgccgtctgcgccagggttacggaagcctttaccttacgccgcctgtcggcaaaagtgatcggcgagatcgaatccatcaccacattaactgccgctatcgccagtggaatgggcgttaccgtactgccggaatcggcggcgcgctcgctgtgtgcaacggcaaatggctggatgtcgcgcatcagtacgccgtcaatgagcctgtcgctctcactgaatacctcggcgcgcggcggtttatctcctcaggctcaggcagtcaaagatatcctgctgtcgctagtcagccgtccgtccctggagaatcgtgaattacagctggtcagttaggttatattcttttaaggaataagttgctggtttttattatttgtttgccgggtaaacagactttaacaatagacatcatgttatgtctgaagacctgggggaaaaggtgaatttccagcaacttaaaattattcgcgaggcggcccgtcgggattacaacctgacggaagtcgctaatatgctttacacctcgcagtctggcgtcagccgccatattcgtgagctggaagaagagttggggatagagatctttatccgccgcggtaaacgcctgctggggatgaccgagcccggcaaagcgctgctctccattgccgaaaggatcctcaacgaagccagcaatgttcgccggctggccgatctatttaccaatgacgcttcaggcgtattaaccattgccaccacgcatactcaggcgcgttatagtctgccgccggtgataaaagcttttcgcgaacttttccccgacgtgcggctggaactggtgcaagggacgccgcaggaaatcgaagcgctgctgcacaacggcggggcggatatcggtatcgccagcgagcgtttaagtaacgacccgacgctggtggcattcccctggttccgctggcaccacagtttgttagtaccaaaagatcatccactgattgaagttacgccgctgacgctagaggcgattgcgcgctggccgttaattacctaccgccaggggatcaccgggcgttcgcgtattgatgaagcctttacccgtaaagggctgatgccggatatcgtcctcagcgcccaggactccgatgtgatcaagacttatgtggagctcgggttgggcgtgggattggtagcggaacaatccggagatgctagggaagcggagacttttacccggctggaaacacgccatctctttgatgccaataccgtttggttggggctaaaacgtggtcagttacaacgtaactatgtctggcgtttcattgaactgtgcaatgccggactatcgctggatgagattaagcgccaggcgatggagccggaggaagtggctatcgattatcaaatctgagcgcggactgctggcaagcgggaggcgtcaaagcagctataattcattcacgtgagtcgcgactgaggaagggaaaatgatggtgcggcgtatgaagttgctttgttctctgatgatgatgttggccagctacagcgcgttggcggtaagttatccattgccgcctgaagggagtcgtctggttggcagcccgattaaaattaccgtacctgagcgtaatacccagccgctggaaacctttgccgcgcagtacgggcaggggctgagcaatatgctggaggctaaccccggcgttgatgtctatctgccaaaatcgggaagctcgttgattattccacagcaattgatcctgcctgccaccgtacgtagcggtattgtgataaacgtcgccgagatgcggctttattattatccgcctgagggcactaccgtcgaggtgttaccgatcggtatcggtcaggcggggcgcgagacgccgcgtaactgggtgacggcggtggaacgtaagcaggaaggacctacctgggtgccgacggcgaatacccgtcgcgagtatgccaaagaaggtaaaaccctgccggcgatggttcccgccgggccggataatccgatggggttatatgctatctacatcggcaggctctatgccattcacggtaccaatgccaattttggcattggtctcagggtgagccagggctgtattcgcctgcgcaacgatgatattaaatatctgttcgataatgtgcccgttggcacgcgagtacagattatcgatcagcctgtaaaatacacgactgaaccggacggtagccgttggctggaagtgcatgaaccgttatcgcgtaatcgcgctgaatttcagtcagaccgtaaagtaccgcttccttataccccggcaatccgcgagtttgtacaaggagccggcgtgaatgtcgggcgcgcggattcggcgttacagagacgttccgggatgccggtgaatattagtagttcagcggtggaaagcagtttttaacaggcgtgaatgttaaaaagcaaaaagcctgctcgaaagcaggctttttaaatttggctcctctgactggactcgaaccagtgacatacggattaacagtccgccgttctaccgactgaactacagaggaatcgtgtgaacgaggcgcatagtactggcctcgcatttttgtgtcaacactaaatttaaccagctgattcaattggcgaaatttagctcaaagcgagcttttaatgaacaacgcgcgcgtcatcttcatccaggagattattttcccgtaagcgctgtagcggatcctggcgatagaactggcagaaccgctgccatagcgccgggaaacgggggcaaacagctccggtgcgctaaagaaatattctgagagcaccgcaaaacactctgccgggtcggttgccgcataggcatcaatgctggcggcgctttccccgaccagatcgatctcatcctgaatgttattcatcgccgcatgcagatcgtgttcccagcctgcgacttcacgtaagggaataaaaggaaccccgctggcgcgatcgccattgcgtgaatccagtttgtgtgcgacctcgtgcaccacaagattaaaaccggaggcatcaaaagagtcctgaatgtctaaccagttaaggataatgggaccctgctgccagctttggccggattggacaacgcgttgattatgcaccagtccgatgtcgtcttcccattcgtcatcgacgacaaaggggcagggtagatcagaacctcgtggaaaccatctaaccactcaaggccaagctccagcaccggcagacaaaaaagtagtgcgatacgtgcgctgtgtagtggggttaactcaaatccctgtaacggcaccagacgtttttgctgtaaaaaacgagctgccatttggcacagctgctgctgttcctgttgagtgaggttcgctaaaaccggaatggcaaccgcttgttcccacgggatttcgccattacctgtctgttcttctgctttccacggccatttaaacatcatatcgctcgcaaagtcgtcacttgaactcaatataagggactggagctattaaaatgccaaagaacctggcattatagcaacctcaacagcggagagatgccggagcggctgaacggaccggtctcgaaaaccggagtaggggcaactctaccgggggttcaaatccccctctctccgccactattcaatcacttacacttatccttttcagtgatgcatatcccgctgagacaatccctttacaaaaaagcatagcgctgaagccgacataggcgccaaagaatcttctcattttctgactcagaccaggactaaatttcagccttttcgcgctcctgtgctcgcgagtatcccttcctgtgctgaagtgctattgagtcacttaccaggcgaaatttaaatgaattcagtgaattgatgtcgacgacgcgccaggcggtattgcttgaccgtaaaaaatggaaaaagcctgcgcgaggcaggctttggtcatgagggatcttagaactggtagaccagacccagcgcgacaacgtcatcggtggcaatgccgtttgcgcggtagaagtagtcatcttcattcagcaggttgattttgtaatcaacgtaggtggacatatttttgttaaagtagtaagtcatacccacatcaacatatttaaccaggtctttgtcaccgctgttgtacaggtctttacctttagactgcagataagcgacagatggacgcagcggtaaaccgtaatcatcgaactgatactgggcaacgacttcgaagttctgcgtcttgttggcgataccgccgccgagatagctggtggatttaccgaaggaagtcatgttgcgggtttccgcgtacatcgccgcgaggtagatgttgttagcatcgtatttcgcgcctacggtccaggcatcggccttatcgccaccggcatatgcgctgtttgcggatgctgcgacctgattgttagtacggtcggaagaagcatatgccgcgccgaagctgatgcccatgccgaagtcgtaggaagtagagataccgaagccgtcgccgttttcacgcgccagtttacgttcgccgccgttattggtgccttcgccagatcccgcgttttcgttattaccctgatactgcagggcaaagttgagaccatcaaccaggccgaagaaatcgctgttgcggtaggtcgccacgccgttggtacggccgagcatgaagacgtcagtctgggtgtatgagtcgccgccgaattccggcagcacgtcggtccaggcttcaacatcataaataacgccgtagttacggccatagtccagtgagccgtagtcagcaaatttcagacccgcgaagcccagacgggtccaggagttagcgccttcaccttcagtggtgttagcctgaatattatattcccactggccgtagccggtcagccgatcgttgatctgtgtttcgcctttcaggccgaaacgcacgtaggtttggtcgccatcttcagaagcatcgtcagtgaaatagtgcaggccgtcaacttttccgtagaggtccagtttgttgccgtttttattataaatttccgcagagtgcgccgcgcctgctgctaataacgctggcagcataatagccaatacttttcttttcattatgtattccctttaatcataattaatatgaattgtctaattccctgtggaatgacaaattgatactagccgcttaagttcatttttaattaaataaaaaatgtaataaaagtatattaaaatatttcaaaatgtttattttatattcaatatatgtattttctattctttaggtaatcactatttccgtagtttattggtgagctattctggttgttgataataaaggttttttgatttttgataataatgatatgcgcattgtaaatagcataataatattgctgattagatggtgataaatttaatttggaatgatttagtttgataatgaatatcgctaaatttcatcaagtcgtcttatttaaaagcatgaacacatccgtaatatataggggagtaccgctcctgcgttcgtggatggccaaaaacgttcagtaccatctcatgcttccggataagcacgataattgtataatgtgattctcgtcacaaatttgtggttggcaatgatgcgctgtggttgatgtatggagaaggatttaatggacactaaagcgaaacggggccccggtggaaagctggcattatgggctttttacgccttttgcggttactttgtgtgggcgatggtacggtactggtggatagtggggcgcattcaaagcgtccccggcgtcagcattgatggtgaattaggttcaacggcgggcaaatggattggcgcgctgctgggttttttggtgctggggggagtgggtttaatccttggggcgatagcctggtacacgcgtccccctattcaggtacatgaacagcgcgattaaaattgctatgctcgaggctagtccagatatcaggaaacgctcatggtattagctgaatggcaacaacgatttgaaaactggttaaatacgcatcatgcgcaggaagatgcggctcatgacatttcgcactttcgccgtgtctggagtaccgcgcagcaactggttggcgatagtggtgctgacgagttggttatccttacggcctgctactttcacgatattgtcagcctggctaaaaaccatcctcaacgtcatcactcttcacggatggcggcacagcaaacgcggtctatcctgcaaagcgctttccccgactttccagccgagcgctatcctgccgttatgcatgccattgaagcgcatagctttagtgcggctatattaccgcaaagcatagaggcgaaaattgtgcaggatgcagatcgtctggaagctctgggcgcgattggccttgctcgtgtctttgccgtttccggcgcgctaaacacgattttgtttgatgccgatgaccctttgctgaccagcgcgatcttgatgacaagaaatatgccctcgaccatttccagagcaaattgctccgtctgcctgagaccatgcaaacggagcagggaagagctttggcggtgcataacgcccaatttctggtgcaatttatggctaagctgagcgccgaattgcgtggtgacccgttgtcgttggatgaagcggttttacgccgctttgcgcctgcggtttaaatccgttgcggctatttgtggtactctctgcaaaaattgtccgtgctggttgaggttatgccgcaaaatttatcccaagaaaacctcctgtccgagccgtcaggggaaaacgcgcaggcgttattgcgccagttgatgacgatatatgatgtcaaaaccctggtcgcacagctggttgcagttggcgatcagcactggagcccggcgatactgaaacgggtggcgacggtgagccgcgcggcgagcagattgacaaacgcggagtgtgtgcatctggcgagccttttaccgactccgccgcgccatcatccaaactatgcgtttcgttttatcgatctcttcgccggtatcggcggcattcgccacggctttgaagctattggtgggcagtgcgtatttaccagcgagtggaataaacacgccgtacgtacctataaagctaactggtattgcgatccgcaagagcacagctttaacgccgatatccgcgaaatcactctcagccagcgccccgatatcagtgatgaagaggcggcgaagtctatccgcgaggcgatcccgcaacatgatgtactgcttgcgggcttcccctgccagcccttttccctcgccggagtatcaaagaagaatgctatgggacgcgctcatggttttgcctgtgaaactcaaggaacattgttttttgatgtcgtcagaattattgccgctcgccgcccgccaatcttcgtactggaaaacgttaaaaatctgaagagccacgaccaaggaagaacctttcgcattatcatgcagacgttggatgagctaggttatgaggtggcggatgccgatcacgcgggcgccgatgatcccaaagtcatcgatgggcgtcattttctgccgcagcaccgtgagcgtatcgtactggtgggtttccgtcgcgatttacaattgcatgatggatttacgttgcgcgatatcgccagtttgtatccgccgcagcggccgacctttggcgagttattggatcctaccgtcgatgctaaattcatcctgacgccagttttatggaagtatctctaccgttacgcgcgtaaacatcaggcgcgtggcaacggttttggctacggtctggtcgacccgacgcatccagctagcgttgcgcgaacgctctcggcgcgctactacaaagatggcgctgagatcctggtcgatcgcggttggaataaaccattgggcgaaaagcattttgacgatccacaaaatcaactacgtcgcccgcggcgcttaacgccgcgcgaatgcgcacggctgatggggttcgaagcgccgggagaacaccgttttcgtattccggtttccgatacccaggcctatcgccagttcggcaactcggtgattgttccggtgtttgccgcggtagcaaagctgctggcgccgcgaatttctgaggcggtaaagcggcgcgttgcaggagatagcgatggcggacgttcacgataaggccacacgtagtaaaaatatgcgcgctatcgcgacccgcgatacagcaattgagaagcggctggcggcgctgctaacgcaggccggattcacttttagcgttcaggaggcatcgttacccgggcggcctgattttctgctgtctgactaccgctgcgttatcttcgctcacggctgcttttggcatcaacatcattgttatctgtttaaagtaccggcgacgcgtaccgatttctggctaaaaaagattggcgctaacgtgcagcgcgatcgccgcgaccaggcgatgttgttagcacaaggctggcgggtgctgattgtctgggagtgcgcgctccgcgggcggcagaaattaagcgatgaggctttacgcgatcgtctggaggagtggatctgcggcggtggcgattgcgcgcagatcgacactcagggaatcggttttatcgatccgattgacaaggagtaacggttgagcgggcagggaagagatatttacctagtgtcaccagcacgaccgcgaaaataatcaccgccagcgccagccattcgataatggagagactttcaccgccaaacccggtccccagcagcacggcgacaaccggattgacataggcatagctggtggccaccgccggcgttacgttacgtattagatacatataggcgttaatggcgataagcgagccaaaaatggccagatacgcaacggcaaatattccggaccaggagggcatttgggtgagtttttctcctgagaaccacgatgccgcggaaagcacaatccctgccgccagcatttcaatcgcgccagccatcatcccggttggtaattcgatacgcgaaccgtaaaccgagccaaacgcccagctcagggaaccaatcagaatcagcaatgcgccccagggattgccgctgaggttgccgccgctattgagcatcactattcccgccaggccgatcgcaataccgaaccattccagcttgcgcgtagcaatgccaaaaaaacggctgaagcagagcgtaaacagcggtacggtggcgaccatcaccgctgcgatacctgatggtacatgctgatgttctgcaagggtgacgaagccattgccgacagcaagcaacaggatgcctatcagtgccgcattaagtagcggccggcgggccgggagtttatggccggtggccagtaaatagataagcaacacgccgccggcagagagaaagcggatcccggccatcatcaacggcggccagctggcgacgccaatagcgatagcaaaataggttgaaccccaaatgatatacagcgcaaaaagcgcgccaataagggggaacagctgacgggtagacatacttcctcgcgacgaaaagagatagaaagggaacatatagttaacgtgaaaactaacgtgctggcgagcgctttcgatgtgatttttttgttatatttttgttgactggtgacatctctgggcgagaaggcgcttttgcctcatactctatgtttcataaacagaaattgaaggaagcacattttggcgggaagtagtcttttaaccttattggacgatattgctacgctgctggacgatatctccgtcatgggaaaattggcggcgaagaaaacggctggcgtactgggcgatgatctttctctcaatgcgcagcaggtcactggtgtaagagccaaccgcgagctcccggtggtatggggagtggcaaaaggatcgtttcttaataaagtgattctggtgccgctggcgttactcatcagtgcctttattccctgggccattacgccgctactgatgttgggggcgcttttctctgctttgaaggctttgaaaaagtgctgcataacctgcacgcgcgcaagaataaggaagacccaaaactgcgccagcagcggctggaaacgctcgcagcccaggacccgctggcctttgaacgcgataaagtaaaaggggcgatccgtaccgattttatcttatcagccgaaatcgtcgcgattaccctgggtattgtggctgacgcgccattgcttaatcagatcctggttttatccggtatcgccattctcgtgaccgtaggggtttacggcctggtgggcgtgattgttaagcttgatgatatggggttttggctggcggagaagaaaagcgcactggcgcagtgggtaggaaaagcgcttctggccatcgcgccgcgattaatgaaaattctgactttcgtcggtaccctggcgatgtttctggttggtggcggtatcgtggtgcacggcgtagcgccgctgcatcatgttatcgagaatcttacccatggccttagcggaatgctggcctctacattgcctgtggtcgcgaatctggtgctaggatttatcattggcgcaatcgtctttggcgtcgtcaaagctatcaccgcgttgcgcggtaaagcgaaataaatccctgcgccggttacgcaagttggtccggcgtcgtctaaggtgaaactgtttcttcctgataccggaggcaaaaatggtcttgttggtcagcgatgaagtcagacgaaaaaatggcgggccgcgaatggtcgtcaccggcattgccggcgaaatggtcgagtgccggtggtatgacggtcacgtcgtacagcgtgaagcattccgtgaagatgagctggtccgcggcgaaggacaacattcgcagcataattagatgtgcagcgcccgctggtgcgggcgcttttaatattgattacgttcggacaaggagcgttgatgttgctggtttctttgaccgtactgcgagtgaataatggataagccgctgtggctaaaaaagttccgtcgcctctacaatccggggcgtgtggtcaatatctgtttcatcgtggtgctgttcttttcaacgttacttatctggcgagaaatacgggtattggaagaagcctacgtcgccaaccaacgtaataatcttgagaacgtggcccatgaaatggatgggctgttgcaatttaatctcaaccggctgctcttttttcgcaatagcatgcagtcggcgctggagaatccgctggatttcgccattctgcgccgggccgagcaggagtacatcagtaaacgtcacgatcccatctggtcagtggagttaaacaaccggcgtactctgacggtatacggagtctcagattcttttgtcgatgctgacgacctgttgtcgcgtaacaatccgcaggccagcaacgaactgatggctacccttgagctgggctatcttctgcgtttgaccaataacaaccgaattttcagcgagcgcatgtcctacgtttctcgcagtggtttttataccaccaccgatgcccgcggagttccagtcaggtgctggcgcagttttcgcgagatacgggatcagcatggtttatgcggcaaacccagcgtgataatccagggcgagggatcctctggcaaacgactcaacaagaagacgggtatacgcaaccgcaggtcgttacggcctcgattcctcttgattatgagcactactggttgggcgtgctggcgatggatttttccatccgcgatctgcagaattttctggtcagtgcggtaaaaggagggcaaatgggcgagtatcagctgtatgacaagcaactcaatttgctggcctcttcggcgccggatgatgtcctgacgctgctttcgcccaaggaacaagaaaaacttcgctatgcgttggtcaatgataaccacggcggcatacgccagttaacccgctatatcagttgggaaaagatccgtaactttgacggtgtactgttgcatattcataccttaaaggagggagtgcgtggtgatttcgggacgatctccatcgcactgaccctgatgtggctgatgtttaccctcatgttgatcgtttcctggttggttatccgccgtatggtcatcaatatgagcgtattgcagtcgtcgcttgagtggcaggcctggcatgatgcattaacacggctgttaaatcgaggcgccttgtttgagcgggcgattgcggcggcccgaagctgccagcggaataatcaacccctctctgtcattcagctggatctggattattttaagggcattaatgataaacacggtcaccaggccggggatcgtgtgctgacgttagtgggcagtactattatggggcagatccgtgaggaagatattgccggacgcgttggtggtgaagagttctgtatcgttctgcctaatacgcaactatcgcaagcgcgcgcgattgctgagcgtattcgtctgcgtatccatagccgggagatattgttgcacaatagcgttagtttgcggatcagcgcctcgttggggtgagtagtagtgagacatcagatgagtttaactttgaagagttacagtcgattgccgatcatcgtctttatctggcaaaacagaatggacgtaaccgggtttattcggctgagtagaacccggtaatgtgatgacgctcactttttctgcggtcacgtcgctcctggttataggaaaattcttaaaaaacgagcgggcttaccctaccgttcgtaaaagaacgataaggggcaagccttgtcgcgcctgggttattaaattggatgtacatataagccgtatttctcaataattctcatcatgaatacttcttgtcatgcaaaataattgaggataatgtctttcatgcatcggatttcccggtgtaacgaattttcaagtgcttcttgcattagcaagtttgatcccgactcctgcgagtcgggatttttttcaccatagcttagcgattggcttcagtaacgctaaagtcatgaatatcaagctcaaaggcttcagccagctcgcgccaggtgtgttcattacgaccatcaatactgacatggtgcggatcatcttcactacgctgcacttcgctttcgctaatctcattgatcgccgccagcagggcatcgacattaacgtcaatcccgtccgtattcgtcacaccacggtctttagcggatttcatcatcactacctcgctcggctctgttagggcctctttaagtatagacggtatataaaaacgccagttacgcaggctgaacgctgcgtgaaggcaggttttgttctacactggctcaaaacgagaggaggcgagttatgcaggtaaacgatcgtgtcacggtaaagaccgacggtggcccacgtcgatcggggtagtactggcaattgagtcgtttagtgaaggaaccatgtatcttgtcgcgctggaagactacccgttggggatctggtttttcaatgaagtggggcacccggacggcatttttgttgagaaagcagagtaggccccatgcagaaactggcggtaatggccgccagtttgccatcaacgcatattgacgtaaattccggaagtaatgttttcagccaaccgaacaatgtggtaaatcacctgtttattatgcgtctggatttttttctttatattacctttatgtgacgaaacggtttttgctttgatattcatctgcctggaaatatgtgaagtagcgtgtccggccatccacatttgcagcatattcgattcggcctgactgagcgatagagtgggaatgcggggcgtgattggtttagatgattggcgttatcggtctgcagataattacccagaatgttatcaaggtctttcggcgtaagggattttgagctgataagtagattcttgcgtacaagtaaatagtggtcaaaatggatgtttgccagcgacataaaataacaaataaggtatcgggataagtagtaatgatgtcgcggataagttgattgctctcttcgtgatgtataaaacagtcctcgttgagaaacacaactgccgggcgcagtgattcgcaacgctctttcagactctgtgcactacgtacctcaatgatatcgcgcttttttattccccggcttgccagatatccggttaaacctagccgggtatagctgcacaaatccatgataatcgttgacatgacccatcctcaatcaacacgtaacgataattcatctggcgccaggccttgtgatgaagtccatttttataacacctgactttatgcggaaagcattagccagactaaactatttgctaataatactcataatttgccaggaatattcttaaagtaaagccacagaaaaagaataaacagtatctatcagtaataatgccggtgctggggcatgtcgtcgcgacgatttcagtttattttcggattatccttatagggcgatcgccaattaaattggcgttgtctgtgttttattcaaaaatgcattactgattcatgttttatacaactaataataatcggttagcgtcaatgctgagattgacggtaagcctcggcaatgggagcatcgtgcaggggtggcggccttaacgctttaatgccacaatacttttttatcggtttgtgggatggatgatgaaaaagattgttatggctggcgcgctgcttaccttggccggatgcgttcaggttgatacttatcaggccgtcgtcaaagcgccggcgcctgcagggctggaagggttctggcaatcgaagggaccgcagagcgcaatggtcagtcctgaagcgattgcgacgtttatcgttaccaaagacggagatactcttgattgccgtcagtggcagcgggtgattgctgagccgggaaaattaatgaaccgtgacaaccaggtttataatgtgaccagcagcctcgatatttatcctattgaacgtaatggaaacacgctggaatacgatcgaatgacgttaacccgcgttgaacgcttaacgccggaatgcgagcaggcctggaaaaagaaccagacggcgagtaaaaccgcacagtaacctattttgacgggccggctaaagccggcccgtttgctttaaaggacctcttcaatcacccacacgcttacgctgcctgcgttacaggtaaatacggcgttgccctcgtcatcagtctcgatgatctcttgtcgattcttgagaaaatccttccagcgtttattggcataattctcgccaagcggcagcgttttctcgccatcgtctccgttggaaagcactactatacagcctggatattcatcggtaccgctgcggctgaaggcgatacagttaggatgatcgaaccacagcgtttgtacgccgtgggcgaaacgctgacgcgcgtcgatgagttcgtgaagctgctcgataaccggcatctcgatggcgtaagtctgtccatccccgccggtatcttcataactagcgccgaacaagtcggcgtaaaatactgagggaacaccgttttcacgcagtaaaatcagcgcataggctagcggtttaaaccatgcctcgaccggcgcttccagcgcctgaagcggttgggtgtcatgattcgtgaccaatgtaaccgcatggaaaggatcggcttcaaccagcgtcccggtgaaaatttgactcatgtcgtaatcgcggccctgacgcgaggcttcatggaatttcatctgcagcggcgcgtcgaacagcatggtattaccgtcaacaaggtcgatatactgctgaagtttatccacctcgtgtgaccagtattcggcaacaataaatagcggtttatcggtggaactctgcacatgctcaatccactctttataaaaccatgccggaatatgtttgacggcatcaaggcggaaaccatcgcagccggtctgttcaatgacccagcgggcccaatattttatctcctcggtgacggcatggttacggaaatcgatgttttcacccatgaggtaatcgaagttgcccatttcatcgtcgacctgatcgttccatccgtcgccggtgtagtcattaacaactttgaatacgccatcttcatcgggattttcgatatggtcgatgccactgaaacatttatagtcccagatgaattgtgaatatttgccaccgcggcccggaaaggtatagcgggtccaggcttcacattcgatgatgtcttccgcaatttgcgtgcggtcctgttcatccacgcgttgtacgcggatgcgttctttctcatcggcgcccatcttatggtttacaacgacatcaagaagtacggcaatttgatgttcttttagcgcattaatcgccgctaacaactgagccttatcgccgtatttggtggcaaccgatcctttctgatcgaattcaccgaggtcgaaaagatcgtaactatcgtagccaaccgaataaccgccggaagcgcccttataggcgggcggcaaccaaatcatattaatgccaatttcattgagattaggcgcaagggcttctacttcccgccatagctcgccaccttccgggtaataccagtgaaaacattgcaacaacgtgggatttttcatcttccatgctcctggcgtcatcaagctgacctttgcagtatgggagataactggcaaatatgaataatttcgttgctttttcgctataccctaaatggccgcatatataataaattggcataagatgtagcggatagatgttggtaggctactgctaaacgccttacactacacgaaaatctcattatattcggggtatctatgaaattagcacttctgggtcgtcaggcgctgatgggcgcaatggccgtagcattgatggctggtgtaagcgtgaaaaccttcgccgctgaaaatctgcttaatcaggtcaaagagcgcggcacgcttcgtgttggcctggaaggtacatacccgccgtttagttatcaaggcgatgatggaaaattgaccggttttgaagttgagtttgccaatgaactggcgaaacatatcggtgtgaaagcagacctcaaacccaccaaatgggacggcatgctggcttctcttgattctaaacgtattgatgtggtgattaaccaggtcactatttcggaccagcgtaagaaaaaatacgacttctccaccccgtataccatttctggtatccaggcgctggtgaaaaagggtaacgaaggcgtgattaaaactgcggcggacctgaaaggtaaaaaagtcggcgttggcctgggcaccaattatgaagagtggttgcgccagaacgtacagggtgttgatattcgcacctacgatgatgacccgacaaaatatcaggacctgcgcgtaggccgtattgacgccattttggttgaccgtctggcagcgttggatttagtcaagaaaacgaataacaccctggctgtaaccggtgaagcattctcccgtcaggagtctggcgtggcgctgcgtaaaggtaatgaggatttgcttaaagcagtggatacggcgattgcagatatgcagaaagatggcagcctgaaggcgctttcagaaaaatggtttggtgctgacgtcactaagtaacgtctgaagatgaaaaaaggcgctgataacggcgcctttttttatttcgcacgcaactgtgtgcataataaggataactaagtcaggaggtgccatgtcactgcaaaatttaacgcgttttccgcgcctggaatttattggcgcgccgacaccgctggaatatctaccacgcctgtccgatcatctcggacgggatatttttataaaacgcgatgatgtcacccccatggcgatgggaggaaataaactgcgtaagctggagttcctcgccgccgatgcgctgcgcgagggcgctgatacgctgatcaccgcaggggcgattcaatcgaaccatgtgcgccaaacggcggcagtggctgcgaaactggggctgcactgcgtggcgttgctggaaaatccgataggcacgcgtgctgaaaactatctgaccaatggtaaccgtttgctgctggatctgttcaatactcaggtcgaaatgtgtgatgccctcaccgaccccaacgcgcagctcgaagagctggcaactcgtattgaagcgcagggatatcgtccttatgtaattcccgtcggcggctctaacgcccttggcgcgttaggttatgttgaaagcgcactggaaatcgcccaacaatgtgaaggcgcggtggagatctcttcggtagtggttgcctccggtagcgcgggtactcatgccgggctggcggttggcctggaacaactgatgccgaacgcagaattaattggggtaactgtgtcacgtagcgttgccgaccagttgcccaaggtggttacgctgcagcaggccgttgccaacagtcttgagctgcaggccaaagcggagattaccttatgggatgattatttcgctcccggatacggtacgcccaatgaagaaggcatggaagcggtgaaactgctggcgcaactggaaggtatcctgctggatccggtttataccggaaaggctatggccgggctgattgacggcattaatcagaatcgctttaaggatgaggggccgattctatttatccataccggtggcgcgcctgcgctgtttgcttatcatccgcacgtctaatgcagaataaatcgaatgcaagaaagtatccaactggtcattgactccgcgccttacctgttaaagggcgcggtttttacgttacagctgagcatcgggggcatgttcttcggcctgctgctgggctttatcctcgcactgatgcgcatgtcgtcaatctggccggtcagatggctggcgcggatgtatatctcgattttccgcgggactccgctgattgcccaattgtttatgatctattacggcttgccgcagttcggcattgagctggacccgattccggcggcgatgattggcctgtcattgaatactgcggcctatgcggcggaaacgttgcgcgcggcgattgcctctatagataaagggcagtgggaagccgccgccagtatcggcatgacgccgtggcagactttgcgtcgggctattttaccgcaggctgcccgcgtggcgctgccgccgctctctaacagctttatcagcctcgtcaaagatacttcgctggcggcgacgatccaggtaccggaactgttccgtcaggcgcagttaattacctcgcgtacgctggaggtctttacgatgtatctggcggcatcactgatctattgggtgatggcgacggtgttatcgacgttgcagaattattttgaaaatcagctgaatcgccaggagcgtgatccaaaatgagtgcgattgaagtcaaaaaactggtgaagaaattccacgggcagaccgtgctgcacggtatcgatctcgaggttcaggaaggggaggtcgtggcgattatcggcccgagcggctctggtaaaaccacgctgttgcgcagcattaacctgcttgaacaccccgaaagcggtaccattcgcgtaggcgatgtgactatcgatacttcgcgtagtattggccagcaaaaagggttgatccgccgtctgcgacagcatgttggctttgtgttccagaacttcaatcttttcccgcatcgtacggtgctggaaaatattattgaagggccggttatcgtaaaaggcgaagataagaacgaggccatttctctggcgcgtgaactgctggcaaaggtagggttgtcgggaaaagagaatagctatcctcgtcgtttatccggcggccagcagcaacgtgtggcgattgcccgcgcgttagcgatgcgcccggacgttattctttttgatgaaccgacttctgcattggatcctgagttagtgggagaggtactcaacacgatacgtcaactggcgcaggagaagcgtaccatggtcattgtcacccatgagatgagtttcgctcgtgatgtcgccgaccgcgcgattttcatggatcaggggcgtatcgtcgaacaaggtaaggccagagagctatttgctaatccgcagcaacctcgtacgcgccagttcctcgaaaaatttctcatgcagtaacacttctctctcatcgtggtcctcacaattggctgggggccgcgatcggacaacctgccaatcaccgccgttgctggcgaggcagaacatattttcttcctgagttcgataaataatcgtcatcgaaaatcgaataatgcgatggctgcgttattttatacatataaataagatttatgtgttagttttatgtatttataataatgattatcaatcagggttatttggtaggttatgagggacattgattttttcagctggcggcgggaaatgctgcaacaattccagtcaactcgtgatggggattcggtttataacctcctccagcagcaaacagaagaactggaatacgactactacgcactctgtgtgcgccacccggtgccttttacacgaccgaaactcacgctgcaatcaacttatcctcaggcctggatgtcccattatcaggctgagaattattttgctattgatcccgtattacgcagagaaaattttctccgcggacatctaccgtggaatgaccagcttttttgcgataccccggaattatggaatggcgcgcgtgaccatggtttaaataaaggcgtgacgcagtgtctggccttgccgaatcatgcattgggattcttatcggtttctgctaaaaacgcgcaaccgggcccgtatcaggaggatgaactagagttacgcctgagaacgttgacagaacttagcctgctggcgttgctgcgtctggaggatgagatggtgatgccgccggagatgaagtttagccggcgagaactggagattctaaaatggaccgcggaaggcaaaacctcagcagaggtggcaatgatattgtctatttcagaaaatacggtcaatttccatcagaagaatatgcagcggaaatttaacgcacccaacaaaacgcaaattgcctgttatgccgtcgcaacaggattaatttgagcgaatcgttcgttctgcgtgtcagacgtgaaaccggctgtcagtgataactttcagccggccctttcttactgacggtaagcttgtttaatttgcttaactgtgctggagaatacggcagcctgagcctcatcttccatctgcgcgatttgcttttccattttaataatcacgcggccagcatccgcctggcccatagcctgaagcattagcgtcagcagggctttcaggcaggagacttcctgcgccagctgttgattattttctgcagtggaaaaatctggtgtgctcatcgatatcctcgtttgctttcagcgctgttgcgcaatactaaatgttaaggcggcgcagtataccacaagcggtagaaaaaaaggagcgtgtgatttgtgttgctggtttcgggcgctgagcggttaaatttactgaataatatctgttcatctaagtgctcatcgttaatttttcccgccgtttctgagtgaagttaattattgttacatctttcgaatcgtatttatccgcaacctgttctgttgctttttttgcgccttctgtagggtgaatgttaaaaaagaaacataatccaactatatgttctgtataggtttccacctggtgtggagacaaattgccataaatgggagggaaatcttcttcaggacactttttgggcttttaaagttacgataaaacccggtaatatatggaagataaactatcagtagcgttatccctaattctggagattattcctttgatcaacgtacttcttgttgatgaccacgaactagtgcgcgcagggatacgacgcattctggaagatataaaagggattaaagttgtcggtgaggcatgctgcggcgaggatgccgtgaagtggtgccgtgcgaatcctgtggacgtagtcctgatggatatgaacatgcctggtatcggcgggcttgaagcgacgcgtaaaatcgcccgctctattgtcgatgcgaaagtgatcatgttgaccgtacatactgaaaatccgttgcctgctaaggtcatgcaggctggcgccgccggttacttaagtaaaggcgcagctccgcaggaggtggtaaatgcgatccgttgcgttgcttcgggtcaacgttatatcgcttctgatatcgcccaacagatggcgctcagtcagattgaaccggaaaaaacggaatcgccgtttgccagtttgtctgaacgtgagttgcagattatgctgatgatcaccaagggccaaaaggtcaatgagatctcagaacagttaaacctgagtcccaagacggtgaatagctatcgttatcgaatgttcagcaaattaaacattcatggcgacgtggagctaactcacctggcaattcgccatggcctgtgcaatgcggagtcgttagcaagtcagtgagtgatgtttttgacgcaaaagctttccttaagacggtgaccagccaaccgggtgtctatcgtatgtatgatgccgccggtaccgtcatttatgttggtaaagccaaagatctcaaaaagcgccttagcagttattttcgcagcaatctggcttcgcgtaaaactgaggctctggtggcgttgatcgcgcaaattgacgtaaccgtcacccataccgagacggaagcgctactgctcgagcataactatatcaagctgtatcaaccgcgctataatgtgttgctgcgtgatgataaatcctatccctttattttcctcagcggcgatacccatccacgactggcgatgcaccgcggtgcaaaacacgccaaaggtgagtattttggtccgttccctaacggctacgcggtacgagaaaccctcgcgctgctgcaaaaaattttccccattcgccagtgtgaaaacagcgtgtaccgcaatcgctcgcgtccctgtctgcaatatcagattggccgttgtttagggccatgcgtcgccggactggtgagtgaagaagagtacgagcagcaggtagaatacgtgcgcttgtttctcgccgggaaagacgaccaggtattgacccagttgattgcccgtatggaaaaggccagccaggcgcttgaatttgaagaagccgcccgcatccgcgatcagatccaggcggtacgccgggtgacggagaaacagttcgtttccaataccggcgacgatctggatgttatcggcgtggcttttgatgccggaatggcctgcgtgcatgtgctgtttattcgccagggcaaggtgcttggtagccgcagttatttcccgaaagttccgggtggtaccgagttgggtgaggtcgtggaaaccttcgtggggcagttctacctgcagggcagccagatgcgaactttaccaggggaaattttactcgatttcaatctgggcgataaaaccctgcttgccgattcgctttccgaactggccggtcgtcgggtgaatgtgcagaccaaaccccgcggcgatcgcgcgcgttatttgaagctggcgcgcaccaacgccgccgtcgcgctgaccaccaggctgtcacagcaatcaacgatcagccagcgtctgcaggccctggcgacgctgctgaaactgccagcggtgaagcggatggagtgttttgatatcagccataccatgggggagcaaaccgtcgcttcctgtgtggtgttcgatagcaatggtccgctacggtcggaataccgccgctacaatattaccggtattactcctggtgatgattatgcggccatgaatcaggtattacgacgtcgttacggtaaagcaatagaagagaataaaatcccggacgttatcctgatagacggcggtaaaggccagcttggccaggctaaagccgtgtttgctgaactggatgtgccgtgggataaaaatcatcctctgctgctgggggtggcgaaggggagcgatcgtaaagccgggctggagacgttattctttgagccagaaggtgagggctttagtctgccgccggattctcctgctctgcatgttatccagcatattcgtgatgaatcacacgatcatgctatctcaggacaccgcaagaaacgggcgaaggtgaaaagtaccagtactcttgagacaattgaaggcattggtccaaaacgccgacagatgttgttgaaatatatgggcggtctgcagggtttgcagaaagccagtatagaagaaattgcgcaagtaccgggtatatctcacggactggcagaaaagatctactactcgttgaaacattaggggctctgtagcaccatagggctaattaacacttacaacatacagttacccgttaccatgcgatttaatattccgacgttgctcactctgtttcgcgttattctgataccgtttttcgtgctggcgttctatctgccttttagctgggcgccttttgtctgcgcgttgattttctttgttgccgctgttaccgattggtttgatggctatctggcgcgtcgctggaaccagagtactcgctttggcgccttccttgatccggttgcggataaagtgatggtggcgattgccatggtgctggttgcggaacactatcatacctggtgggtgactttgccggcagcgacaatgattgcgcgtgaaattattatttctgctctgcgcgaatggatggctgagctgggtaaacgcagcagcgtagccgtatcatggattggtaaagtgaaaacgactgcccagatggcggcgctggtctggatgctgtggcggccgaatatgtgggtggagtgggccggtattgtgctgttcatggttgctgcggtgttaacgctgtggtcaatgctgcaatatttgaacgctgcgcgcggcgatttgcttgaacagtgatcgtttcggcgcaaatttcagcaaacgagacgaagttacgaaaaataccgttgactcaccgcgtgagataagtagaatgcaacgcatcgaacggcggcacagtcttccagacgataacaaaatcaagtgattagctaatctacttgatgatgcgggaatagctcagttggtagagcacgaccttgccaaggtcggggtcgcgagttcgagtctcgtttcccgctccaaattaaaagcatcggcagtagcgggtgtttaagtattaaaggcgcgttagcaaagcggttatgtagcggattgcaaatccgtctagtccggttcgactccggaacgcgcctccactttatatcccgagcccggatggtggaatcggtagacacaagggatttaaaatccctcggcgttcgcgctgtgtgggttcaagtcccactccgggtaccattgggataaagtagaataatcaaagcaataagcagtgtcgtgaaaccacctccgggtggttttttcatttctgaagcgtcatttcctgacatcattcctaatatacgccacctgcagagataggctctgagcgctataaacgctatttgtcctatgacaatatacccgctccctgctactcttaatgggattttcgcaccagacaacaggagtaggggaaaatgtttaccggattgtgtgcttttccgctgacgccactgcgcaataatgaggtggatagccgcgcgctaataaaaatcatcgaccgtctggtctcggcgcgagttgattcactgggcatcctcggctcgaccggcagctatgcttatttgagccgggagcagcgcaaaatggtggtcctggcggcaaaacagcatacacaagggctcccgatgatggtagggataggcgcgatggcgacggatatgattctacgtcttgctgaggatgctcagcaggcgggggcggatgctgtgctgctaccggtgctgaactaccagcctctgacggatgatgaggtgtttacactgttccaggcggttaaccgccatgtgtcggtacctatttgtatctatgataatccgcgcacaacccacagagccctttctgatgcgcttgttgagcgtattgcttcgttatccaatatcgcatcaatcaagatccccggtttgccggacgaccaggctggcgtcagagtcgctacgcttcgtcagcgattgccgcagcgagtgagtataggcgtcagcggcgacgcttttgccgcagcagggttaaacggcggctgtaatctgtggtattccgtttgcgccggtctgttcccgcaaattgcccaaaatattaccgcagcagccttgatcggcgagcggcagcaggcatcggcattaagcgaacagctggagccattatgggcgttgttcagacagcacggcagtctgaaagtgatcgccgccgccgcctctattcttgaactagccgaagtagagtgtttaccgcgaccattagccccgctttccacggatgccattaacgatgttaaatcggtcatggataagcttgatctacgctgaagtttggcgtctgttccttccctatttttgtcaggaaactcgtaaactatttaaggtaatatataccagcgttgcagataatgctgaattaatgtcctttggggatgtgatgcctttatggcaatgataactatatatgagggatcttatggccacgttgcttgaaagctacgggaactgttttcgaaaatatgccactttccgcggccgagccgcgcgccaggaatatgtggtttttaccattgcaaactttatattgtccgcgattctgggattgatccccgtcgttggcggtattttcgggttaattattatcattccggggatcgcggttgcggtgcgccgtctgcacgatctcaacaaatctggttggtggttgctggccccctacggcattatgctaatcggcctgattggcattgccgccaccgtcgaagagggcagagccgcagtatgggtatgggcgatcgcgctgggcggcctggccgcgttggtgatgtcgatttggatgattttcacccgtggtaccattggcagtaaccgctttggtgatgaacagaacgatgacaacaacagcggtaatacgatgggcaagagttctgccgcggatgacgtcagagagcgcctggcacaggctaagaaaatgcttgatgacggcgtcattagcgcaagtgaatacgaagtgatgcgtgctaatatcattaaagatatgtagctgattcgccgccgggcctgcccggcgttaataaattcacctgcgttagcgagagcgggtggttttctcctcccattttcgctactgtaagcgccatttttctaccatcatgagcctgttaatgaaaaccggacccctgaacgaaagcgaacttgaatggctggacgagatcctgtcgaaatatgccactgagggcgccatccttgatgtctccgaacttgatggtctgctgacggctatcttatccgggccgagcgaaatcgaaccagcacagtggctgcttgctatctggggggcgcggataatgtaccgcgctgggctaacgatcgcgagcgcgaccgtttcgtcaacctgacgttgcagcatatgagcgacatcgccgaacgcctggctgactatccggagcagtttgatccgctgtttggcactcgcgaatttgaaggccaggaactgaccattgttgaagagtggtgcttcggctatatgcgtggcgttgccctctgcgactggtcgacgttacctgcggaactgcaaccacagcttgatgccattgcgttacacggaacagaagaacgcttcgaagcgctcgatacgctaaccgcggatgaatttgtcgaaagcgttgatagcataaagcccgccgcgctggctttatataattactggatggagaacgctcagccgacggccgtgcagcaaccggtaagaaatgagaccaaggtggggcgtaatgatccttgcccctgcggtagcggcaaaaagtataagcagtgttgtttagctaaataacaaaaggggccaaccaggcccttttgtttaccccacagcgggtaacaatcctgccacaatgcagaattgaatggccactatcgccacgccacagcccaataccagccagagcgcaatcaagccgcccggaacacgccaggttgcctgtgggtgcagttttcggcttttcattactaataatgatggcaacatcagcgccagtacggcgagcgccacgccggcgtagcccagcgccatcacgaaacctcgcggatagaacagggcgaaagccagcggcggcaggaaagtgatgacgccgctctgtatacgtccggcaggggtgtttttacgctggaacaaatctgccaggtaatcaaacaaacccaatgcgacgccgaggaaagacgtcgccagagcgaagtcggcgaacagatgtaccgccacctctacatgcggcgaggcgacaacgtcgcggattgctgccagcaggccgttcaggccggaattctgcgccagcacggcggtaaaggccggagagtcgatgctgccaagcgtggcgagttgccagaaaatataggcgaccagtggaataaagctaccgatgataaacacgcggcgcagtttacgaatatcgccattcagatagctaacgatgctgggaatactaccgtgaaaaccaaacgaggtgaaaatcaccggaatagcggagagcgccaggccttgctgtaacggcagagtcaggagatttatctggtgaatatgcggcagcagcagcaccagcatcaccgcaaggaagataattttggcgctgaataaaaagcggttaaacagatcgaccagagaagtccctatgcacaccaccgcgccgccaatgccggtaaagagcaatacgccggcagaaggcggcaggctccagttcagccactgattaaggctggaggcaagcagttcgccagcaccgctgatgtaggccgccgtaagcgcatacatcagaaatagcatacagaaaccggtaatccattggccgtagcggccgagatagcgcgccgccagtgagcctaatcccatatccgcagggacatgttgataaacttccagcagaagcagggcggtatagcacatcagcgcccacagcgagatcagtaatactagggtgatgccaaaaccgactcccgccgaagcgagcggcatcgccaacataccggcgccaattgtggtaccggcaacgattaaaatactacccagagtgcggttcttcacgcttttctctatctatgaaggaatgaacgaatatttatgtcgcgcagagtatgtgaaatgagtgatttcgtcaaatgatggttacaagtggtgtacttaaatatttacacccctgaagggcggaaaagactgcgttggcgcaaagccgccaggcgcatgctgatatatgctgcaagctttacaggaggagttatgtcatctattcatggtcatgaagtactacagatgatgatcgcatcgggcgagtcgtacagcgttgccagtctcgaagcggctattaagaggcaatttggcgaagatgctcgctttcacacctgttcggcgcaggatttggacgcggcgcagttggtgacgtttttgcagcggaaaggtaaattcattgcggttgaagaggggttcaataccagcgagagtaaaatttgccgtcattgagcgagcggcggccggggaggtcgccactgtgggaattagttttgcgtatcgagggttgccagttctttatcgatgaagtacaagccttcaccacttttaccggcaagggtcagtttatcaataacagatttgaataatttctcttcttcatgctgttcagctacgtaccattgcaggaaattaaaggtcgggtaatcctgattggtcatcgcagcatgcgccagttcattaattttttgcgtaattaactgttcatgttcataggtctggcggaacagttcatcaagtgaagcatattcggcaaacggcgagctaatggcgttaatgcgcggcagactgccggtatcggtcaagtaatcgaacaggcgctgcatgtgcgtcatttcttcctgtgcgtggcgacggagaaacgctgccgcaccttcaaaactatggtagctgcaccatgcgctcatctgctgataaagcaaagaagaataaagctcaagattcatttgttcattaagtttttcgatcatttctgctttcagcatggcgtccactccggaaataaagaataaatcatagtgtgccgtcactataatttgttagtaatttatttgcaaaaagtaaattaaaaaaatcaattagtaaaaatgcaaatgggaataaaacgcattggcaatataataataaatgagaatggttttaatttgatatttatttcgtaaattatcgcgggaagagaaactacgaatattaagtggtgtgaacctggaacggtagggacgggtcgagcgaggctggaaatgtgaagcgctacgccttttataaaacgccttttcataaagtttgaaaaagcatttatgaagtagtagagtcctgataacgctaacacatatcgggcagcgcccggacagtattcaggagagttaagcatgaaaatcgcactgatgatggaaaacagccaggccagcaaaaatgctatcattctcaacgagcttaatgtcgttgccgatgaaaaaggcttcccggtttacaacgtaggaatgagcgatgaacacgatcatcatctcacctatatccatctgggcatcatggccagcatcctgctgaattccaaagcggtcgattttgtggtgaccggttgtggcaccggccaggggcgctgatgtcgttgaacatccatcccggagtggtctgtggttattgtattgaccctgcggatgccttcctcttcgctcagatcaataacggtaatgcgttgtcgctgccttttgctaaaggctttggctgggggcggaattgaacgtgcgctttatttttgagaaggcctttacgggccgtaatggcgaggggtatccgccggaacgtaaagagccgcaggtccgcaatgccgggatcctgaataaagtgaaagcggcggtggtgaaagaaaattatcttgataccctgcgggcgatcgatcccgaactggtaaaaaccgccgtttccggaccgcggttccagcaatgcttcctcgaaaactgccaggataaagaaatcgaagcttttgtccgcgagattattggctgatagcgctcttcagacaggcctgtaaccatgtgcaggtctgtttgttatggtttttctttactggagtgctgccggcatctcgcgtaagtcgcagcgtgtcaagcatccctactaaacaaatcagcgcaatagtgatcaggtaggcgctgatgccaatattgagcgcgaccgccgctacgccaaaatccttcgccatatcaggcagggcggtagcgatgacagtgccatcgagaaactccatgaagaaagcggcagccaccaataatgccggggcggaaaaagcgtctgtttttggcgtaattgctcttgtacccattgcgtcgttgccatagccaagcgaataactatccaggcggtacgttttcttttcgccgctcccgcacatgtttttttatctggtgcgatttaggttactattacgctcctgaaaataggagtaaaaaatgtctcaacctttcactgaacaagatgagctggtatccgatgtcgtcgcatgccagctggtcatcaaacagatccttgatgtgattgacgttatcgccccggtcgaggtgcgcgaaaaaatggcaacgcagttgaaagcaattgattttgcgagtaacccggcttcggcggatccggtgacgctgcgagctgtgcaaaaagcaattgcactgattgaactgaagtttactccgcagggtgaagcgcactagctttattactgagaagttgattagctggccgttccagtctgaaacggccagattcaattagtgcggttgaggcgagatgagattgagtagtcgacggtctgtctgctccatcccgagcccggctttatcagcagtgcgtatttcttcaaggacggtttgcagtaacagcccatcttgctgctgctctttctccagcagcgtcaaaaaacgccacgtcgtgtcatcgcgctgcgcttttgcttcctgcgcaagaccggacagcatgctgctacgctgctgatattcttcgagagttttggcaaacacttcttcaagcgttgtgcattgtggtggatagctttcgtcggctttgacaattggccaggcgccggcctttttcatatagtcaaaaacctgcatcattaacgtcacgctggattgcgcacgggtgcgcaagaaggttgctgtgccgttgaggcgctgctgcgcgcaccattcgcctaaatgtagataaacatttgatgcgtgaaactcaaggttaatctgggtatttaatttctgaaccattcctggaactgccataacaatatccttatttatccgcaagggaagtatgacgcgctaccatcgccttgcacaggcgaattttgcaagcgcaacgcacgggcaggaaataaatacgatgcattccatttgcacgtgactatttatatctgccagtgctttaagaataaccttgtttggtgaataagaaaactctcaacaggaataatttacggtttgttacaacatcactttactgcttgtttttaatgatatttttcattgttttttattttaactcactgattttaaattgttatattaaagcgctcgtagagctatttaatttgtattagtgacgtttatttaacggtaaattcatatatcgatcatggcttattcattattcgaaaatagcgagatgataatgatcttgtgatagatcattttttgttagaagtaggagaaaaacgtataagctggcggagaatcgaagggcagagtcgcgcgggatgatgttagcgaacccacaaggataagtctgctggtgatatggactatcgtgccacatatggcgctaattgtctgacaattagcgttttttttatgtcattttttgctgaatttatgtacgcaattactgtaattctgcggtgtgatgacgctctcgtatggataaataatttccagttaaaactattttaacaacggcaatgttgattgcgttttttctaatgccttgttttaagaccgataaaaaatttaagtccgatttttccctacagaaaagcgaattaaagctggagtttaccatgcacaaatttactaaagcgctggcggccattggcctcgcggcggttatgtcacaatcagctatggctgaaaccctcaagctcggtttcctggtgaagcaaccagaggaaccctggttccagaccgagtggaagtttgctgataaagccggcaaggatttgggctttgaggtgattaaaatcgcggtgccagatggtgaaaagacgcttaatgcgatcgacagtctcgccgccagcggcgcgaagggatttgtcatctgcacgccggacccaaaactggggtcggcgattgttgcgaaggctcgcggctatgacatgaaagttatcaccgttgacgatcagtttgtgaatgccaaaggtaagccgatggagagcgtgccgctggtaatgatggccgccagcgaaatcggcgctcgtcaggggcaggaattatataaagagatgcaaaaacgcggctgggatgtgaaagataccggcgtgatggcaattactgccgatgaactggatactgcccgccgccgcaccaccggctcgattgacgcactgaaagcagcgggtttcccggaaaaacagatctatcgcgtgccaaccaaatctaatgatatcccaggggccttcgatgctggcaactcgatgctggttcagcatccgcaggttaaacactggttaattgttggtatgaacgataacaccgtgctgggcggcgtacgtgcgactgaaggccagggctttaaagcgccggatgttatcggcatcggtattaacggcgttgacgcggtgaacgagctttcgaaagcccagccgacgggattctatggatctctgctgccaagcccggatatccatggctataaaaccagtgagatgctttacaactgggtgacgaaaggcaccgagccgccgaaatttaccgccgtgactgatgtggtgctgattacccgcgacaactttaaacaagagttggcgaaaaaagggctgtaaggcccggttcaatctgcctcccgccctggcgggaggttatgcgtagtagagcggagtcgttatgcaacaatctaccccttatctctcatttcgcggtatcaccatgacgttccctggcgttaaagcactgtctgacattagctttgactgctatcgcgggcagatccacgcgctcatgggtgaaaacggcgccgggaagtccaccctcttaaaaattctcagcggtaactacattccaactgccgggcatctacaaattgatggtcagcaaatggcattcacgaatactaccgctgcgctaaatgctggcgtagcgattatttatcaggaacttcatctgatcccggaaatgaccgttgccgagaatatctatctgggccagttgccgcacaaaggcggtattgtgaaccggtctttattgaattatgaagcccggctgcagctggaacatctgggactggatatcgacccggaaacgccgctgaagtatttgtcgatcggccagtggcagatggtggaaattgccaaggcgctggcgcgtaacgcgaggatcatcgcgttcgatgaacctaccagttcactctcagcgcgggaaatcgacaatcttttccgcgtgattcgcgagctgcgtgaagaagggcgagtgattatttatgtctcgcaccgtatggaggaaattttcgccctcagcgatgctattaccgtgtttaaagatggtcgctacgtgcggacctttgacgacatgcggctggtggatcacgatgccctcgtgcaagcgatggtggggcgtaatcttggcgatatctatggctggaaagcgcgtgaatatggcagcgagcggctgcgactggatcaggttaaagcgccaggtgtcagaatgccgatcagtttatcggtacgcagcggcgagatcgtcggcttgtttggtctggttggggccggacgcagcgaattaatgaaggggctgtttggcggcagcagaattaccggcggtcaggtctatattgacggtcaggcgcttaatattcgcaaaccggcgcaggcgattcaggcgggaatgatgctctgtccggaggatcgcaaagccgaaggcatcattccggtacattcggtgcgcgacaacatcaatatcagcgcgcggcgtaagcatattcatgccggctgcctgattaacaatgcctgggaagcgagtaatgccgaacagcatatcaaatccctcaatatcaaaacccctggagctgagcagttaattatgaatctctccggtggtaatcagcaaaaggccattcttggtcgctggttgtcggaagagatgaaggtcatcctgcttgatgaaccgacccgcggtattgatgttggcgcaaaacatgaaatctacaacgttatctatgcgctggcagcttctggcgtggcggtcgtttttgcctccagcgatttgccagaggtgctcggcgtcgctgaccgcatcgtggtgatgcgcgaaggtgaagtggccggtgaattgctgcatgaaaacgcgaatgaacagcaggcgctgagccttgcgatgcctaaagtcagccaggccgtagcctgagtaaggagtgaatgatgtcatctgtaactacacccagcgcggcacgatcctctttcagtttcggccgaatctgggatcagtttggtatgctggtggtcttcgccgtgttgttcatcggctgcgtaatctttgtccccaactttgcctctttcgtcaacatgaaagggctggggctggcaatttctatgtcgggaatggtcgcctgcggaatgctgttttgcctggcctcaggtgattttgatctgtcagtcgcttctgtcattgcctgcgccggtgtgacgacagcggtggtgattaatctcagcgaaagcctgtgggttggtattgccgcaggattactattaggggcggtcagcgggctggtgaatggttttgttattgcgcgtttgaagatcaacgcgctaatcacgaccctggccaccatgcaaattgtccgcgggctggcctatattatttccgatggtaaagcggttggcattgaggatgaacgtttcttcaccctgggttatgccaactggtttggtctacctgcgccaatatggctaacggttgcctgcctgatcatctttggattactgctgaataaaaccacctttggccgcaatacgctggcaataggggcaatgaggaggctgcacgtcttgctggggtgccggttgttcgtaccaagattatcatcttcgttctttcaggtctggtatcagcggcggcgggattatcctggcttcgcgcatgaccagtggtcagcctatgacctcaattggttatgaactgattgtgatctcggcatgtgttctgggcggcgtatcgctaaaaggcgggatcggtaagatctcttatgtggtggctgggatcctgatcctgggtaccgtggagaatgcgatgaatctgctgaacatctcgccattctcgcaatatgtggtccgcggggtgatattgctggcagcggttatcttcgaccgttacaaacaaaaagcgaaacgtgcggtttaatcgcgcgcaacttttaagtctactcataatgtcccgccagcgcccgctgcgctggcggtgactatcaaaaatggcgatgctggtcacactgtctatacttacatggctaacaattagttaacaaccagcgtaatgctggccatgataaggaggaatacagggtggctgaccagatatctgtaccgcctgagctaaccggaaaccacgctttttttctggatcttgacggcacgcttgccgatatcaaacctcatcccgatcaggttgttatcccgaagacgtccttcagatgttgcgattactggcacagcggcaacatgacgctgtggcattgatttcagggcgctcactcgcagagctcgacgcacttacccgtcactggcgattgccgcttgccggcgtccacggggctgaacgccgcgatatcaatggaaaaagacacgatgtatcactgccgccggcgctgagccgtgaggtcggcgaagcattaacttcggcgctacaagcgctgcctggcagtgaactggaagataaaggtatcgcttttgcgctgcactatcgccaggcgccacaacaccagagcgccatcctggcattggcgcaggaaatcgtacagcgttatccgattctggccattcagcaagggaagtgtgtcgttgagatcaaaccgcgcgggattaacaaaggtgaagcgattgcagcgtttatgcgggaagcgccttttgcgggacgaaagccggtatttatcggcgatgacctgactgatgaggcgggttttactatggttaatcaattaggcggagtatcgataaaagttggacaaggcgacactcaggcgcgctggcggcttgcaaatgttgccgccgtacatcagtggttacgtcacgtcgtcgacaatacgcaatgcctggatgtattcactaacgggagggatgaccatgggtcgtttagtcgtagtatctaaccgtattgcaacgccgaatgataaaaaggccagcgctggcggcctggcggtgggtattttaggtgcgctgaaggcgagcggcggcacgtggtttggctggagtggggaaatcggcgatgatagccagccgttgaagaaggtgagtaaaggagatatttcgtgggcgtcattcaaccttagcgaagaagatcacgagctctattacaatcagttttccaatgcagtactttggcccgcgtttcactatcgtctcgacttagtcaattttcagcgtccggcgtgggagggttatctgcgcgttaacgccgccgtggcgcaaaaactgctgccgctgcttgccgacgacgatatgatttgggttcatgattatcatctattgccatttgccagtgaattacgcaaaaacggcgtcaagaaccgcattggcttcttcttacatattccgtttccgacgcctgaaatattcaacgctttacctccacatgcagagcttcttgaacagctttgtgattatgatttactcggctttcagaccgaaaacgaccggcaggcatttgttgattgcgtcgcccaacaaactaccttgtgcgaagtgggtcaccagcaataccgtgcctggggtaagacgttccgtactgcggtctatccgataagcatcgaacctcaggaagtcgcgcgcagcgccagcgggccgttgccgccgaagttggctcaattgaaagctgaactaaaaggagttaagaatattttttccgttgagcgcctggattactccaagggctgccggagcgttttcaggcttacgaggcgctgctggaaaactacccccagcatcgtggaaaaattcgctatacccagatagcgcccacttcgcggggcgatgtccaggcgtatcaggatatccgccatcaactggaaacggccgccgggcgaatcaacggccactatggtcaactggggtggacgccgctgtattatttgaatcagcacttcgatcgcaaactactcatgaaggtatttcgttattcggacgtgggcctggtcacgccgctgcgcgatggcatgaacctcgtggccaaggagtttgtcgccgcgcaggaccctgaaaacccaggggtgttggtgctatcgcagttcgctggcgcggctaatgaactgacttccgcgctcatcgtcaacccttacgatcgcgatgaagtggcggcggcgctggaccgcgctctgactatgccgcttgccgagcgaattattcgccatggcaaaatgctcaaggcgatcgagagtaatgatattgataactggcaggcgcagttcgttgccgatctaaagcgggtaaagtcgcctgaagatagctgccagcagccaaccgtagttactccctccgcgtagtcaaaacggctgatgcttcggcatcagcttattccagggaaaccaacagcacatcgactccgctgctgccgacgatattcttcgctgaacaggttgcgcgggaaaacaggctctggttatggttgccgcagatgaccaggtcgacgtgatgctgacggcaaaaatccttcacgtgatgacaaagttcgccgctggcgatggtcattttgctgatggggtagtccgcctgggcggcgagttcattaagaaagctacgtgtctcctcctgcacaatctcacgcaaattctccatcatcggcgcggcgaactgattatacatttccggatctgtcgccagcgtgatcaggctgacctgcgcattaagcggacgtgcgatagacaccgctttattgaccaacatgcggctttccggcgttggggcgacggcgactaacagatgagagtagggcatctagcctccttgagatacgcaacgggatctttctactttctttactcctaattccatctttccacaagggtattcccgcggttaaaaacgtctttctccgaccgtgtgatatcagattctggcagccgactcgcaaaaatgattctctcttttgctttaaaagaaacgctgttttataaatcggtgacgcatgttgcccgcccctttgtttttttgccactgaatgattggtactggcaaaaatgcaaaggtaagccggttttcatgatcttactgtagccatgtatccgcaaaacttcggtagagcccgtggtaggccgaagttatctaataaaaaagagacaggatttacggcgatgaaaacacgaaaaatcggtttggctaattatctcgcctatggttccggcgattttctcggcgcgggaaccaccgcgcttaccgcagcatggctactctatttttacaccactttctgcgggctatcgcctattgaggcgacgctcatctttgccaccgcgcgcgtgcttgacgcggttgtcagccctctgatgggtttttaaccgataacttcggctctacctggttgggtaagcggttcggcagacgcaaattctttattttgctcggtattccctgtgtctttagctactcaatgatgtgggtaggcgatatgggattctggtattacctcgcgacttatctgctgtttgatattgtctataccatgattctggtgccctacgagacgctagtgccggagatgaccgatgatttcaaacagaagaccaaattttccggcgcgcgtatttctatggcgcaaatgtcggcgatattagcctcgtttctgccggggatcctgcttacccaactgggtaaagacaacgccagctcatttttctatgcaagcctggttttttcggtgctgtgcgcgctgatgctgaccttcgtctggtttttcacctgggaacgcccgcgggaagcatggtctgaagcggcgttacgcgcggaagaagaaaagcgcaacttaactctcgcgcagagtcttaatcgcctgtttattgagctcagctctacgctgcgaattaaaatcttccgccagcaccttggtatgtatctgggcggttatatcgcgcaggacgtgttcaacgccgtgtttacctattacgtggtctttgtgctgatgcaggacgcctctgtcgcctctaacttgcttggtacgatggctatcttccagttcatcgcagttatcgccatgatcccgctatgcatccgctttggaccggcgccttcataccgcatggtagtggtgctgtttggtttgagctctctctcttatgccgtgctctattacgcgggctaagcgacgtctattcattattactgctcatctccgctatcgcgggtctgggacgcggcggcattaattatgtaccgtggaatacctacacctatattgccgatgtcgacgaagtcattaccggccagcgtcgggagggcattttcgccggtattatgacgctgacccgcaaagcgtcgcaggcgggggcggtgatgctggttggcatcatcatgcaactatcgggctttgtctccgggcaaaaaactcagccggaaggcgtcagtcataccattctgttgatccttagcgtcggtactttagtggtgctggcctgcggtttcctggtctccctgcgctttaaactcaatctgcatacgcacagcgtgctccgcgccgagacgatggtgatgcgtgatatcggttacgcacagccccagcagacgactgccgaaaaccgcgcggtggttgagctgctggcggggatgccttacgactgcctgtggggtaataacaacattggctacctgaatcgcaataaacctgccgccccggcgctgaatcagggcggcgctttgaattcgacatataccagaggttaagaacatgaaagtttggccggtcaaacatagcccattactgtgtcagcctgagcgctttatcgcgcgtagcgaactacaagcgttgattcgtaatgtgacgcaaaacctggtgaatattaaggatgacaacgggcagtttttacttcggctggacgatgggcgagtcatcgataccaaaggttgggccggttgggagtggacccacggcgttgggctgtacggcatctaccagtattatcaacaaaccggcgataccgcgatgcgcgatatcattgatggctggttcgccgaccgtttcgccgaaggggcaacgaccaaaaacgttaataccatggcgccgtttctgacgctggcttaccgctatgaagagaccgggcgtcaggaatatctaccgtggctcgatagctgggctgagtgggcgatgcatgagatgccgcgtaccgagcagggaggcatgcagcacattaccctggcggaagagaaccatcaacagatgtgggatgacacgctgatgatgacggtgctgccgctagccaaaatcggtaaattactaaatcgtccgcaatacattgaagaagcaacctatcagttcttgctgcatgtacagaacctgatggacaaagagacaggcctgtggttccacggctggagttatgacggccgacacaactttgcgcgtgcgcgctgggcgcgaggtaacagctggctcaccatcgtgatcccggacttccttgagctggtggatttgccagaggggagtgcggtgcgccgctatctgctacaggtactgaatgcgcaaattgccgcgttagctgactgtcaggacgtgagcggcctctggcataccctgctcgacgatccgcattcctaccttgaagcgtcagcgacggcgggttttgcttacggcattctgaaagcgatacgtaagcgttatgttggggcggagtacagcgcggttgccgaaaaggcgatacgtggaattgtgcgaaatatttcaccacaaggagaactattgcaaacttcgtttggtaccggaatgggctccgatctcgatttttatcggcaaattccgctcacgtcgatgccgtacggccaggcgatggcgattctttgtctgacggagtatctgcgcaaatatttctgatagcggcatagattccccggccgcgctgcgcttacctgggcgactaataaaacaaacccggctttcgccgggtttgtttttacatccgctctacggtctcaatacccagagtatcgaggcctaacttcagcgtcttcgccgtcaacagcgccagtttcaggcggctattacgggcctcttcgctttcggcgctgaggatcgggcaatgttcgtagaaaccagagaacagaccggccagatcgtacaggtaggcgcacattacgtgcggagtaccttcacgggcgacgacggccagcgtttcttcgaactgcagcaggcgggcagccaactgcgcttcgcgatcttcactaatgacaaccggcgcggcagccagcgcgctttcgtcgataccggctttacggaacactgacagcacacgggtataggcatactgcatgtaaggcgcggtattaccttcgaatgccagcatgttgtcccagtcgaaaatgtaatcggtagtgcggtttttcgacagatcggcatatttcaccgcgccgataccaacggcgttggccagtttttccagctcatcggccggcatatccggatttttctcggcgaccaggcggcgtgcgcgctccagtgcttcgtcgagcagatcggccagtttgacggtaccgccggcgcgggttttgaatggtttaccgtctttaccgagcatcatgccgaacatgtggtgttccagcggtacggattccggtacatagccggccttacggacgatagtccacgcttgcatcagatgctgatgctgacgagagtcgatgtagtagagcacgcggtcggcatgcagcgtttcataacggtattttgcacaggcgatatcggtagtcgtatagaggtagccgccatcctttttctggatgatgacgcccatcggttcgccttctttgtttttgtattcatcaaggaagactacggtcgcgccttcgctctcgacggccatgccttttgctttcagatcggcaacgatccccggcagcatcgggttgtacaggctttcacccatcacatcatcgcgagtcagggtgacattcaggcgatcgtaggtgatctggttttgcgacatggtgatgtcgaccagtttacgccacatctgcaggaagtattcgtcaccaccctgcagcttcaccacgtagctgcgcgcgcgctcggcgaaaacttcgtcttcatcgtagtgttttttcgcttcgcggtagaaaccttcgaggtcggccagcgccatttctccggcgttttcctgctgctgcttttccagataagcgatcagcatcccgaactgggtaccccagtcaccgacgtggttggcgcggataacgcgatggccgaggaattccagagtacgtaccgaggcatcgccgatgatggttgaacgtagatgaccgacgtgcatctctttcgccacgttcggcgctgagtagtcaacaacgatggtctgtggctgtggtttcgccacgcccaggcgctcggactgcagcgcgagattgacgttgtccgccaggaaggccggatcgaggaaaatattgataaagcccggtccggcgatttcgactttattggcaatgccattcagatcgagatgagacagtacctgctctgcaagttgtcgcggcgccatgcccagttttttggccaccgccatcacgccattggcctgatagtcgccgaactgaacttttgctgactggcggacctgaggttcgcaatcggcaggcgcgcctgccgcgatcagggcctggctgactttttctgagagaagagcctgaatattcaccggaataccttacttttaaggcgcgagaacccctgtggggcggcgccggaacatggacaaattaaggcgggagtatactgcatttgcgccccgtcgtcagcaccacacgcaagttgccgggcagcaagcttaatgaataaccattcgttgctcaggcgcccggattaccggttggtcggggcggtgaaacaggataaattagcctttttagcgatcaccgaggcgcaagatggcgaactggcagcaaattgatgaactaaatgatatttcggcggatttaccgcgttttaacgatgccatactggcgctggcggatcgtctggggctggatatgacaccgctggacgccgaccatatttcgctgcgttgtcatcaaaatacgacggcagagcgctggcggcaggggctggagcgttgcggcacgttgctatcggaaaatatcattaatggccgccccatttgcttatttaaacttgccgaacctatttgtgtcgcccactggcgctttaccgttgtggagttgccatggccgggtgaaaaacgctatccgcacgaaggctgggaacatatcgaaatcgttctgccgggtgacccggaaaccctcaacgctcgcgcgctggcgctgctctccgataacggactcagccagccggggattttcgtaaaaaccagttccccgaaaggagagcgtgaacgcttgccgaacccgacgctggcggtcacagacggcaaagtgaccatcaaattccatccctggacgattgagcaaatcgtcgccagcgagcgatccgatgcttaacagtgtgaagcggcgcggcgtctgtgaggggaaatcgtgacatgctgtgttgcccgtaatgaaaatggagaagggaaggatgttactggaagtctgctgctatagcatggagtgcgcgctcgaggcgcagcgttgcggcgccgatcgcattgaactgtgcgccgcgcccaaggagggcggattaacgccgtcgctgggcgtgctgcgttcggtgcgagacaatatctcgattccggttcatccgataattcgtccgcgcggcggcgatttttgttacaccgaggggaatttgccgccatgctggatgatgtgacgacggtcagagaactaggctttgctggtttggtgattggcgtactcgatgctgacggccaggtagatatcgcccgcatgcaaaaaattatggcggcggcggggccgctggcggtgaccttccatcgggcttttgatatgtgcgccgacccgcgtcaggcctggcattcgcttgctgaactgggcgttgctcgcatcctcacttccggtcaacgggcaacggcggagcaaggtctagcaaaaattatggaactaattgcgctgggtgatactccaatcattatggccggagcgggagtgcgggctgccaatctgcaacaatttctgcaggcaggcctcaaagaggtgcatagctcagcggggcagtggttgccatcgccgatgcgctttcgtaacccgggcttatcgatgtccaccgacgcagatgccgatgaatattgccgctatgccgttaacggcgaggcggtggcggaaatgaaacagattatttcttccgagcggggttaacccgcgaagctaaccgttttttgctgcacatcatgtcgcccaatatgatgattgcccgtaccaggcccctgcaatttcaacaggggccttttttatcccgcgagcgccagtagtcgctcgaggttaattatgccctggccgcggccgcttttttggccagcgactgttgcgtctctggtttagtggcgacgatcaccgcgcgcagcggtgcggggtaaccttccagcgttttgctgctgtcatgcgggtcgaggaagtcggcgagtgattccgtcgtcatccattcggtgcggcgctgctcttcgctggtggtgacgcaggtatcaactatgcgcacatcgatgaatccgcacttctccagccactgtttcagcgcggcggctgaagggatgaaataaacgttacgcatttgcgcgtagcggtcgccgggcaccagcacggtgttctcatcaccttcaacgaccagcgtttccagtaccagctcgccgccgggggctaactgatctttgagctgccacagatggtccagcggggaacggcggtgatagagcacgcccattgaaaagacggtatcaaaggcttcaagcgccggcagttgttcgatgccgagcggcagcaggtgcgcgcgctgatcgttgccaatcagtttgcgtaccgcttcaaactggcataagaacagctgtgttgggtcgataccgaccgccagatgcgcgccggcgccgatcatccgccacatgtgataaccactgccgcagccgacatcgaggatagtacgaccggtgagatcggaaagatgcggcagtacgcgttcccatttcaggtcagaacgccattcggtatcgatattaatgccatacagcgaataagggcctttacgccacggcatcagatttcgcagcagattttcaattcgcaaccggtggccttcgctgagtggcgtttcgctttccgccgtgacgctatgcaatagatcgagacgccagggtgccagttcgggcagaaactcaacggcgcgttcccattcgcgaaacttgccgtgcagcgcttcgcgttgccaggccgcgacctgagcgggcagcgtttccagccagtgggagagcggtcctttcgcgatcaactgataaaaattactgaagtcgatcatgcccgttcctcggatttaaccgccaccaatgaaccaaagttaaagcactggaaccacagttcggcatgttcaaacccggcctggcgcagacgcgatttgtgggtttccactgaatccgtcagcatcacgttttccaacatgctgcgtttctggctgatttccagttcgctatagccattggcgcgtttgaaatcatggtgcatgttgaacagcagttcgccgacattggcgtcttcaaagctgaatttttcggaaagcaccagcgcgccgcccggattgagcccctgatagactttatcaaggattgcctgacgttcactcggttcgaggaactgaatagtgaagttcagcacgaccatcgaggcattttcaatggcgatatggcgaatgtcgccctcaataacctcaaccggcgtcggcgctttataggcatcaatatgacgacggcagcgttctaccatcgccggggagttatcgatggcgataattttgcatcccggatgcgcaatattgcgacgcacggaaagcgttgcggcgccgagagagcagccgagatcgtaaacctgagtgtttggctgaacaaaacgctcagccagcatgccgatcatcgaaataatattggagtaaccaggaaccgagcgctggatcatatccgggaagacttcggctacccgttcatcaaaggtccagtcgccgagactggcaatcggcgcggaaaaaagcgtatcgcggtgagacataacgttaaacccgaaaaaacgaaaacggcgtattgtgcgctaacgaagggagaaaaccaactcccagggcatataccacaggttagccagcaccatcagcaacagcgagcaccaggtggcgctcattccagaacgtcgccagcggaacaggcgatgatggaaaccgtaggagtgcatcaggcgtccggcaatcagcaaaataccgcaaacgtgaatcatccaggttagcgcgccgttcatttccatgaacaacagcagaatgagcccaatggggacatattcgaccgcattgccatgaacgcgaatagcgatctgaagttcgctaaaaccaccgtcgccatagccgacgcgatactgcatgcgcagacgtaccacgtcgaaggaaaacttgattaacaataacgcacccaaaaccgcatacagcgcgctgaccatacccaaaactccctttaattatgtcaggtggctccgactatcatagcaggatatcagaaaagcgaggattgctgcggaattgacggcgcggcgccgacgcccggcagcaccgcgcgtagatcttcccataaggtatcgaccagttcaggcgcctgggcgatatctggggtatgcagaaacagccatggcgtggccgactgatgccactttggcagcgtctgtagccagacgcgaaataattcgcgattctgcatcatattgtcgctgccgataaaacgcaccatgggctgctccgcggtcatgaccgcgtgaaccgggactttgggtttctttttttgcgcgtcgatcatcgccgggttacgcgcgacggcgctatgtaccggacggctatcgaggatcacacggttcactttgcgctggtgtagcccgcgattaagctgctgttcggcatcgcctttagcgaaaaactcgggatggcgaacctcaacaccgtaagtgaagtgtttcggtagcgtatcgagaaaatgccacagggcagggaggtcacgcgggccgaaggtggcgggcaactgcaaccagtactggccgatgcgcgattccagcggcgccagacgggaaaaaaattcatagcttaaatcgtcgcagtcgcgcagcgccgcctgatgcgaaatcgtggccgggaatttaaaacagaaccgaaactcatcgtgagtttgttgataccagcgatcgacaatctcggcctttggtaaggcataaagggtggtattaccctccacgcagttaaaatggcgggcatactcttcaaggccagtgataccaaggcgcacccatttagggtgcgaccattgcgggagcccgatataaatcataaggcggcgagaatatcctcagtgctgcgcacgcgggcgatgcgcgggaagatatgcgtcatactcccctgatgctgttcggcggacgcagcgctgcacgcatcctcggcgatgaccagattgaaaccgagttcccaggcattgcgggcggtggattccacgccgatattggtagaaataccgcaaagaataatggtatcgatgccgcggcggcgaagctgcagttcaagatcggtaccgtagaacgcgccccactggcgtttcgtcacttcaatatcgctatcctgcttaccaagcgctggtggatagatccaccagttttcaggcaacttcgcggcgccagtctgggcatctaccggctgttttaacgcttcggcgaaatcggccgaccagcccacacgaaccatgatgacgggcgcaccctgttgacgacatttttcagccagcttcgccgcgcgcgcaaccacctcgtcggcgcggtgcggtccgccggcaaagggtaaaatgccttcttgcaggtcaataacgaccagcgcagtgtttttcgcattgagttctaacatggtatccccgtatcttgttctgttgtcaggccgctacaataccgttgctaattcggctcaagggtaacaaattttgttaatttatgtgagcacaagcaataagcgcgcagcaaagcagcgtacaaactgcgtcgggcttatcgtcagacagaatttccagtataatagccgccttttttcatccagtagtgacattcagcaaagctgcgacctcgtcgcctgcaaggcaggcaacatccgcctgcggctaagttaagggatatctcatgcgtacagaatattgcggacagctacgtcagtcccacgtggggcagcaagtgaccctgtgtggttgggtcaaccgtcgtcgtgatctcggaagccttatcttcattgatatgcgcgaccgtgaaggcatcgtgcaggtgtttttcgatccggatcgtgcggatgcattaaaactggcttccgaactgcgtaatgagttctgcattcaaatcaccggtaccgtgcgtgcgcgtgaagagcgcaacgtcaaccgcgagatggccaccggcgaaatagaagtgctggcgtctgacctgaccatcatcaaccgcgcggaagcgctgccgctggactccaaccacgtcaacaccgaagaagcgcgcctgaaataccgctatctggacctgcgtcgtccggaaatggctcagcgcctgaaaacccgcgcaaaaatcaccagcttcgtgcgccgcttcatggacgatcacgggttcctcgatatcgaaaccccgatgctgaccaaagctacgccggaaggcgcgcgtgactatctggtgccgtcgcgcgtacataaaggtaaattctacgcgctgccgcagtctccacagctgttcaaacagctactgatgatgtccggtttcgatcgttactatcagatagtcaaatgcttccgcgacgaagacctgcgtgccgaccgtcagcctgaatttacccagattgatgttgaaacctcgttcatgaccgcgccgcaggtgcgtgaagtgatggaagagctggtacgtaaactgtggcaggacgtgaagggcgtagatctcggtcaattcccggtgatgacctttgccgaagcggagcgtcgttacggttccgataaaccggacctgcgtaacccgatggagctggtcgacgttgcggatctggtgaaagcggtagaattcgccgtcttctccggcccagccaacgacgccaaaggccgcgttgctgccttacgcgtgccgggcggcgcggcgctgacccgtaaacagattgatgaatacggcaaattcgtgcagatctacggtgcgaaagggttggcctatattaaagtgaccgagcgtgcgaagggccttgaaggcatcaatagcccggtggcgaaattcctcaacgccgaaatcgtggaagctattcttgagcgcaccggcgcgcaggacggcgacatgatcttcttcggcgctgacaacaagaaagtggttgccgatgccctcggcgcgctgcgtctgaagctgggcaaagacctgaatctcaccgacgagaccaaatgggcgccgctgtgggttattgacttcccgatgttcgaagacgacggcgaaggcggcctgaccgcgatgcaccacccgttcacctcgccgaaagatatgactgccgccgagctgaaagccgctccggaagatgctgtggctaacgcctatgacatggtcatcaatggctacgaagtcggcggtggttcggtgcgtatccacagcggggaaatgcagcaaaccgtgtttggtattctgggcattaacgaacaagaacagcgtgaaaaattcggcttcctgctggatgcgctgaagtatggtacgccgccgcacgccggcctggcgtttggcctcgatcgcctgaccatgctgctgaccggtaccgataacatccgtgacgttatcgccttcccgaaaaccacggctgccgcgtgcctgatgaccgaagcgccgagcttcgcgaatcctgccgcgttaggcgaactggggattcaggttgtggcgaaagaggcaaaagagtctccggagaacaactaagatgtcattcaagctgcccgtctccgttctggtggtgatttacgccgaagatacgaagcgggtgctgatgttgcagcgacgcgacgatcccgctttctggcagtcggttaccggcagcctggaagaggggaaaccgcgttgcaggccgccgcgcgcgaagtaaaggaagaggtcgccattgacgttgctcgcgagcaactggccttaattgactgtcagcgtacggtggagttcgagatattttctcacttacgtcatcgctatgcgccgggcgtcgagcgcaatacggaattctggttccgtcttgcgctgccccatgagcgccagattgttttcactgaacatctggattaccgctgggttagcgcgtcggatgccgccgcgctaactaaatcgtggagcaaccggcaggcgattgaagaatttgtaattaacgccgggtaacttcccgcggcgtttgccgcggaaagacggcttttttggagagttttttatggcaggtcatagtaaatgggccaacaccaaacaccgcaaagcggcgcaagatgccaagcgcggtaagatctttactaaaatcattcgcgagctggtcaccgctgcgcgtctgggtggcggcgatccggcatccaacccgcgtctgcgcgcggcggtagataaagcgctgtccaacaacatgactcgcgacaccctgaaccgcgccatcgcgcgcggcgtcggcggtgatgaagacgcgaacatggaaaccatcatttatgaaggttacggcccgggcggcaccgcggtaatggttgaatgtctgagcgacaaccgtaaccgtaccgtagccgaagtgcgccacgcctttaccaaaaccggtggtaacctcggaaccgacggttctgtggcctatctgttcagcaaaaaaggcgtgatctccttcgagaaaggcgacgaagacaccatcatggaagccgcgctggaagcgggtgctgaagacgttgtcacctatgatgacggcgccattgacgtttacaccgcctgggaagagatgggcgcggtacgtgatgcgctggaagccgcaggcctgaaagccgatgctgctgaagtctcaatgatcccgtcgactaaagcggatatggatgcggaaaccgcgccgaagctgctgcgtcttattgatatgctggaagactgcgacgacgtgcaggaagtgtatcataacggcgaaatctccgatgaggttgccgcaacgctgtgataccggtagccggtattgcgggtgagttattactggaggcgcgtgatggctattattctcggcattgatccgggttcacgcgtgaccggttatggcgtaattcgccaggtcgggcggcagttgagctaccttggcagtggatgtatccgcaccaaagtagacgatttgccgtcgcggctgaagctgatttacgccggcgtcaccgaaattattacccagttccagcctgactatttcgctatcgaacaggtctttatggcgaaaaatgccgattcggcgttgaagcttgggcaggcgcgcggggtggctatagtcgcggcgacgaaccaggacctgccggtttttgagtacgcggctcgccaggttaagcaaaccgtcgtcggtatcggtagcgcggaaaagagccaggtacagcatatggtgcgtaccttgctgaaacttccggcaaatccgcaggcggatgcggcggatgcgctggccatcgccatcacccattgccacctcagtcagaacctggctcaaattagcgagacccggctcaatctggcgcgagggcggttacgataatcacaaatcaggctggatattcatccagcctttttttatgataacgcattagactttcggccctttattcaggagcgctacgtgataggcagactcagaggcatcattctcgaaaagcaacccccgctggtattactggaaaccgggggcgtaggttacgaagtccatatgccgatgacctgcttctatgagctaccggaagccgggcaggaagccattgtcttcacccattttgtggtgcgtgaagacgcgcagctgctgtacggttttaataacaagcaggaacgcacgctgtttaaagagcttatcaaaaccaacggcgtcgggccgaagctggcgctggctatactttccggcatgtcagcgcagcagtttgtgaacgccgttgagcgtgaagaagtcgcctcgctggtgaaactgcctggtatcggcaagaaaaccgccgagcgtttgatcgtagagatgaaagatcgcttcaaaggcctgcatggcgacctgtttactccggccgccgatctggtgctgaccacgcctgccggcccaacagccgacgacgcggagcaagaagcggttgccgcgctggtggcgctgggctataaaccacaggaggccagccggatggtgagcaaaatcgcccgtccggacgccaacagtgaaacgctaatccgcgaagcgctgcgcgcggcgttgtgaggtaagggatgattgaagcagatcggctggtatcaggcgacagcataggtttcgaagaggccgcagaccgcgctatccgccccaaattgctcgcagagtatgttggtcagccgcaggtgcgttcgcagatggagatctttatccaggcagcgaaactgcgcggcgatgcgctcgatcacctgctgatttttggcccgccgggtttggggaaaaccacgcttgccaatattgtcgccaacgaaatgggcgtgaatctgcgtaccacctccggcccggtgttggaaaaggccggagacctggcggcaatgctgactaaccttgagccgcatgatgtcctgtttattgatgagatccaccgcctttcaccggtagtggaagaggtgttgtatccggcgatggaagattaccagctggatatcatgattggcgaaggcccggccgcgcgctcgattaaaatcgacctgccgccatttaccctgattggcgccaccacccgcgccggctcattgacttcgccgctgcgcgaccgctttggtatcgtacagcgcctcgagttttatcaggtgcctgacctgcagcatatcgttggccgcagcgctcgtcatatggggctggagatgagcgaggaaggggcgctggaagtagcccgccgcgcgcgcggtacgccgcgtatcgccaaccgcctgctgcgccgggtgcgcgactttgccgaagtgcgccacgatggctctatctcggcggaaatcgccgctcaggcgctggatatgctcaacgtggatgctgaagggtttgattatatggatcggaagctgctattggcggtgatcgacaaattcttcggtgggccggtcggcctcgataacctcgcggcggctatcggcgaagagcgggaaaccattgaagacgtgctggagccgtacttaattcagcaggggttcttgcagcgtacgccgcgtggccgaatggcgacggtgcgcgcctggaatcacttcggtattaccccgccggaaatgccctgattaaccccggtagctttccgctaccgggtagtctctcaatcaactcgccgttttcttcatcatgctcagaacaaacagcgccgctgcgcacagcacaaccgaaggtcctgcaggggtatcgtagaacgccgagaaggttaatcctccggtcaccgccagcatacccacgccaatggctaccgcggccatctgttccggcgtgcgggcaaagcggcgggcggtagcggccgggattatcaacagcgaagtgatgattagcgcgccgacgaatttcattgccacgccgatagtcaatgccgtcaccagcatcagcagcagcttaacccgctgcaacttcacgccgtcaacaaacgctaaatcagggctgatggtcatcgccagcaggttacgccactgccagagcaatatcgcgaccactaccaccacgcctaacgcaatggagattaaatcctgcggggtaacggctaacaggtcgccaaacagataggccatcaggtcaacacgtacgttcgacatcaggcttaccaccaccagaccgagcgacagcgcgctgtgggccataatacccagcagggtatcgaccgccaggtgagggcgtttttccagccacaccaggccgcccgccagcagtagcgtgaccacgataaccgcataaaacggattaacgttgagcagcagaccaaacgccaccccaagcagcgaagcatgcgccagcgtatcgccaaagtaggacattctccgccagacaacgaacgaacccagggggcccgccgcgcaggcgagcatcatgccggctaaccagccgggtaacagtaattcaatcattagcgaccatttccccgacgcagtacaatccgccctgcaggtcgtggcggtgattatgttggtgacgataaattcccagctgttccgcgccgcgtgggccgaacatggagataaattccggatgcatcgagaccacttccggggttccggagcagcaaatatgctggttcaggcacagcacttcatcggtttttgccatcaccaggtggagatcgtgggaaaccattagtaccgcgcagttcagctcctgacgcagttgattaattaaatcatacagcgctacctgcccattaacgtcgacgccctgggtcggttcatccagcaccagcagttgtggttgattcagcagggcccgtgccagcaacacgcgctgggtttcgccgccggagagtttttgcattggcgcatcgataaggtgtccggcctgcacgcgctgtagtgccggcataatatcctgcttgcgcgtacctggacgcagacgcataaagcggctgaccgtcagcggcatggtcgcatcaagatgcagtttttgcggcacatagccgatacgcagatttttctcgcgctggatcataccttcggtcggcgtcacgaggccgagcaccacgcgcaccagcgtcgatttcccggcgccgtttgggccaagaagcgttaagattttgcctggttttagcgttagcgaaatgtcagacaacacgcgccgctggccgtagacgaccgcgactttttccagcgttacaagattcgtcatgtcaaattaggggttgcactagcgattgaatgttataatatcacatcaccttcgctcattacgatgattagtcgcattatgttacataaaaatacgcttctttgcgctggacttagcgccgcttttttgttcgctcatgccccggttgcgcatgccgccgtcgtcgcttccatgaaaccgcttggctttatcgcatccgccatcgccgatggcgtaacggatactcaggttttgctgcctgacggtgcttccgagcatgattattcactgcgcccgtctgatgtaaaacgcttacagaacgcagacttagtggtatggattggtccagaaatggaagcattcatggacaagtcaacgcaaagcattgcggagcagaaaaaggtcaccattgcccagttggatggggtgaaaccgttgctcatcaaagggacggatgatgacgatgacgaacatgctcacgaacatgctaatggcgaaaaaagtgacggcgatcaccatcacggcatctacaatatgcatctgtggctctccccagagatagcgcggctctcagcggttgcaatccacgataaattattggaacttatgccgcagagtcgagccaaacttgacgccaacctgaaggaatttgaggcaaaattagccgcaaccgacaaacaggtgagtaacgagctggcgccggtgaaaggtaaggggtatttcgtttttcatgatgcctatggctactacgaaaaacattacggtttgacctcattggggcattttaccgtcaaccctgaaatccagcctggtgcgcagcgtttacacgaaataagaacacagttggttgagcaaaaagcgacttgcgtttttgctgagccacaattcaggccagcggtcatcgaagctgttgccagggggacctccgtgcgcatgggaaccctggatccacttggaatcggaattaagctgggtaaagacagttacccgcagttcctgagccagttggggcatcagtattcaagctgcctgaaaggagattaacgaggaagtgaatacgtgcaacagatagcccgcgctgtcactcaggcattcaacaatctgccacgaccccatcgcgttatgctggggtcgttgagcgttctaacgttagcggtcgccgtctggcggccctacatctaccacccggaatcagccccgatagtcagaacgattgagctggaaaaaagcgaaatccgctctctgctgccggaagcttccgaacccatcgatcaggcgccgcaggaagaagaagctatcccgcaggatgagctcgatgacaaatccgatagcgactctggcggccatgaatatgtggtttctaccggcgatacgctgagcagtattcttaatcagtacggtattgatatgggcgatatcgctcaactctcctctgctgataaagagctgcgtaatcttaaaattggtcaacagctctcctggacgcttaccgctgatggcgatctacaaagcctgacgtgggagatgtcacgccgtgagacgcgtacttataaccgcgtcgccaatggttttaaaatgagcagcgagctgcagaaaggggattgggtcaacaacgtcctgaaaggcaccgttggcgccagcttcgtctccagcgcccgtgatgctggccttaccagtacggaaatcagcgcggtcatcaaagcgatgcagtggcagatggacttccgtaagctgaaaaaaggcgatgaattctcggtcctgatgtcgcgtgaaatgcttgatggcaagcgcgagcagagccaactgctgggcgttcgtttacgttccgatggcaaagattattacgcgatccgcgccgaagatggcaaattctacgatcgcaacggtacgggtctggcgaagggcttcctgcgcttcccgacctcgcgtcagttccgcgtgtcgtccaacttcaacccgcgtcgcctgaatccggtgaccggtcgcgtcgcgccgcatcgtggcgttgacttcgctatgccgcagggcacgccggtactttccgtcggtgacggtgaagtggtggtggcgaaacgcagcggcgcggcaggctactatgttgccgtgcgtcatggccgcacctataccacccgctatatgcacctgcgcaagctgctggtgaaaccgggccagaaagtgaaacgcggcgaccgtatcgcgctgtcgggtaataccgggcgttctactggcccgcacctgcactatgaagtctggatcaaccagcaggcggttaacccgttgacggcgaaactgccgcgtaccgaaggcttaaccggttccgatcgtaccgattacctggcgcaggccaaagaggttatcccgcaactgcgctttgattagtctgaataatctttacagaaagccggcgtccgtaatgcgccggctttttcttttgtgcgatgagtgacgtatcgctaaactaagccattatctttattgattgagcaggcattctgcggaccgggcatggaaacgaaaaaaaataacattgaatttatccccaaatttgagaaatcttttttactgccgcgctattggggcgcgtggttgggcgttttcgccttcgccggcattgcgctgacgcctccctctttccgcgaccccattctcggaaaactggggcgttttgttggacgcctggcaaaaagctcccgccgtcgggcgcagattaacctgctgtactgcttcccggaaaaaagtgagcaagagcgtgaagcgatcattgatgcgatgtatatgtcggctccgcaggcgatggtgatgatggccgaactgggcatgcgcgatccgcagcgcgtgatgtcccgcgttgactggcaggggaaagagatcatcgacgagatgcgccgcaataatgaaaaggtcatctttttagtgccgcacgcctggggagtggatattccggcgatgctgatggcctcgggcgggcaaaaaatggcggcgatgtttcataaccagggaaatccggtatttgattatgtctggaacaccgtgcgccgtcgttttggcgggcggatgcacgcgcgtaacgatggtatcaaaccgtttattcaatcggtgcgccagggttattggggctattatctgcccgaccaggatcacggcgccgagcacagcgaatttgtcgatttcttcgcgacttacaaagcgacgctcccggcgattggccgtctgatgaaagtctgccgcgcgcgcgtagtaccgctattcccggtgtatgacggtaaaacgcatcgtctgacggtactggtgcgcccgccaatggacgacctgttggaagccgatgacacgacgattgcgcgccgtatgaacgaagaggttgagattttcgtcaggccgcacaccgaacagtatacctggatcctgaaactgctgaagacgcgtaagccaggcgaaactgaaccttataagcgcaaggaactgtttccgaagaagtaagctgtatgctgcgctgagcagggctacgacgcctgcatttacaggataacaagcataaaaaagcctccgtaaggaggcttttccatcactgaagatgattactcaacggtcaggatacgggtggtgttggtactgccgatggtgctcatcacgtcgccctgggtgacgaccaccaggtcgccggagaccagatagcctttatctcgcagcaggttaaccgcgtcgtgcgcggcggcaacgccgtcgttatggctgtcgaaatgcaccggcgttacgccacgatagagcgccgtcaggttcagagtacgctcgtgacgggatagggcgaaaattggcagaccggagctgatacgcgaggtcatcagcgcggtgcggccggactcggtcatggtgataattgcggtaatacctttcaggtggttggccgcatacatggccgacatggcaatcgcttcttcgacattgtcgaactggacgtcaagacggtgtttagaaacgttgagacttgggatcttctccgcgcccaggcacacccgcgccatcgcggcgacggtttctgacggatactggccggcagcggtttcggcggagagcatcacggcatcggtaccgtccaatacggcgttcgccacgtccatgacttccgcgcgggtcggcatcggattggtgatcattgattccatcatctgcgtggcggtgatgaccgagcggttaagctggcgagcgcggcgaatcagcgccttctggatacccaccagttccggatcgccgatttccacaccgagatcgccgcgagccaccatcaccacatcggaggcgagaataacgtcgtccatagcatcctggtcgcagaccgcttccgcacgctcgactttggcgacgattttcgcatcgcagccagcgtcacgggccagacggcgagcgtagttcaggtcttcgccgcaacgtggaaaggagaccgccaggtaatcaacgccaatttttgcggcggtaacgatatcggctttgtctttatcggtcagcgcttcagcggacaacccgccgccaagtttgttgatgcctttattgttcgacagcgggccgccaacggtaacttcggtgaaaactttcatcccctgtacttccaggaccttcagctgtacgcgaccatcgtcgagcagcaggatatcgcctggaacaacgtccgccggcaggcctttatagtcaataccgactttttctttatcgccttcgcctttacccaggttggcgtcgagcaggaatttgtcgccaatgttgaggaaaattttgccttctttgaaggtagagacgcggattttcggcccctgcaggtcgccgagaattgctacgtgacggcccagttttgctgcaatttcacggactttgtccgcgcggagctggtgatcttccggcgttccgtgagagaagttcatgcgtacgacgttagcgcccgcggcgataaccttttcgaggttgttatcgcggtcagttgccgggcctaaggtcgttacgattttggttctgcgaagccttctggacatgtaatactccgttgactgaaacaactttggtgttgcgtgaacatggattcggtagcgccaaatccgctaacgggcggaactgctacgctgccgggacataattggtctctgacttataatgactattattgtttatcactactaatgagtagttctttatcaaagcgcgattccttcagcgcttccttgaccctcttcaagttatctctgaattttgctccacggcgcagggtaaagccggtcgccagcacatcaatcaccgtgagctgggccaggcgcgacaccatcggcatataaatatcggtatcttccggaacatccagggtaatggccagcgtcgactcgcgcgccagcggggtgccggccgaggtgatggcaatgaccatggcatcgttttcacgcgctagctgcgccagttcaaccaggcttttggtgcgtccggtatgtgaaatgatgaccaccacgtcatcatcgttacaattcatacagctcatgcgctgcaggacaatatcgtcggagtagatgaccgggacgttaaaacggaaaaatttattcatcgcgtcatgcgcgacggctgctgaagaccccaggccgaagaaggaaattttcttcgcctgggtaagtagatccactgcccggttgaccgcggacatatccagcgcatgatgtacctgatcgaggctggccatcgccgattcgaaaattttcgccgtataggattcgacgctgtcgtcttcatcgacattacggttaacatagagggtaccgtgtgccagactttgtgccagatgcagtttaaaatcggggaacccccgggtttccaggctgcgacaaaatcggtttacggtcggctcgctgacgccggcttccagcgcgagggccgcaatgcttgagtgaatggcctgcgccggggtggcaagaatgacttccgccactttgcgttcagatttgctaaggttttccagtcgggactggattttttccagcatgttcattgtttacaggcgctcatcaatggaaacgatttcattaatgggtgaaatcatcaggcgttttagcaagaatatacccctccgcaatcagaagcggtgaggaatgacgagaaaaaatgtcgttttttttcattacatgatcagagtcgtattttactaactgaaaaccagacgaaacaacgaacattcttagcctgatgcccaatttgtcggcgaacgcttttcctctatgtgcggtaacgtcgggaaagctccgccaagggtttcaggaaattcgtaaacacagtacagtgcagcgtaagaaaattacaaatttagcctggcataagcaccagactatcaactgaggagaatgacatggcggtaacgcaaacggcccaggcatgcgatctggtcattttcggcgcgaaaggtgacctcgcgcgccgtaaactgttgccttccctgtatcagcttgaaaaggcaggccagattaaccctgaaacccgcatcatcggcgtaggtcgtgccgattgggataaagacgcttacaccaaagttgtgcgtgaagcgttagaaacctttatgaaagagaaaatcgacgaaggtttatgggataccctgagcggtcgtctggacttctgtaatcttgatgtcaacgataccagcggttttacgcgtctgggcgatatgctggatcaggaaaaccgcgtcaccattaactacttcgcgatgccgccaagcacattcggcgctatctgcaaaggcctgggcgaagcgaagctgaatgccaagcccgcgcgggttgtgatggaaaaaccgctcggtacctcgctggaaacctcccgggaaatcaatgaccaggtgggcgagtatttcgaagagtgccaggtttaccgtatcgaccattatctgggtaaagagacggtactgaacctgttggccttgcgctttgctaactccctgtttgttaataactgggactgccgcaccattgaccacgttgaaatcaccgtggcggaagaagtgggtattgaaggccgctggggttatttcgatcaagccgggcagatgcgcgacatgatccagaaccatctgctgcagatcctgtgcatgatcgccatgtcgccgccgtccgatttgactgccgacagcatccgcgatgaaaaagtgaaagtgctgaaatcgctgcgccgtatcgatcgctcaaacgtgcgtgagaaaaccgtccgcggtcagtacaccgccgggtttgcgcaaggtaaaaaagtaccgggttatctggaagaagagggcgctaacaaatccagtaatacggagacctttgtggccatccgcgtggatatcgataactggcgctgggctggggtgccgttctacctgcgtaccggtaaacgcctgccgacgaaatgttccgaagtggtggtttacttcaaaactccggaactgaacctgtttaaagagacctggcaggagctgccgcagaataaattgaccattcgtctgcagccggatgaaggtgtggatattcaggtgcttaataaagttccaggcctcgatcacaagcataatctgcagatcaccaagctggatctgagctactccgagaccttcaatcaaactcacctggcggatgcttacgaacgcctgctgttggaaaccatgcgcggtatccaggcgctgttcgtgcgtcgcgatgaagtggaagaagcgtggaagtgggttgactccattaccggtgcatgggcggccgacggcgacgcgccgaaaccttaccaggcaggtacctggggaccggtggcgtcggtggcgatgatcacccgcgatggccgttcctggaacgaattcgagtaagactagcgttaatccgggagagttattttaccggtaacatgatctggcgcagtctggcgcataatttttaatcttttaagccccgggaggattcacccccgggctttttttattacactgcctgtagacattttgcccctgagccccagtggtggtgccatttacaccatttttcgtcgtcatcgcgcggtggccggacagataaattttgaggagcctctatgaattcgacaatgttacgggtaacaaatcgcattatcgaacggtcacgcgaaacccgctcagcctacctcgcacgaattaatcaagccaaaagcgataccgtccatcgttcgcagttggcctgcggtaacctggcgcacggttttgccgcctgtcaggcagatgataaagcgtcgctgaagagtatgttgcgcaacaatatcgccattatcacctcctacaacgatatgttgtcagcccaccagccttatgaacattacccggatatcattcgcaaagccttgcactccgccaatgcggtagggcaagtggctggtggcgtgccggcaatgtgtgacggcgtgacgcagggccaggatggcatggagctgtcgctgctgagccgcgaagtgattgccatgtctgccgccattggtctgtcgcacaatatgttcgacggtgcgttgtatcttggcgtatgcgataaaattgttcccggactgaccatggcggcgctctccttcggccatctgccgtcggtgtttattccgtccggcccgatggccagcggcctgccgaataaagaaaaagtgcgcattcgtcagctgtacgccgaaggtaaagttgaccgtatggcgctgcttgaatccgaagccgcctcttatcatgccccgggcacctgtaccttctacggtaccgccaacaccaatcagatggtggttgagtttatgggcatgcagctgccaggttcctcgtttgttcatccggacgccccgttgcgcgaagcgctgaccagcgccgccgcgcgtcaggtgacgcgcatgaccggcaacggcaatgagtggatgccgctgggcaaaatgattgacgaaaaagtggtggtcaacggtatcgttgcgcttctggcgaccggcggctccaccaaccatacgatgcacctggtggcgatggcacgcgcggcggggattatcattaattgggatgatttctccgatctttccgatgtggtgccgctgctggcgcgcctgtatccaaacggtccggcggacattaaccacttccaggcggcaggcggcgtgccggtactggtgcgcgagctgctgaaaggcggattgctgcatgaagatgtcaacacggtcgccggcttcgggctgtcgcgttacaccatggaaccctggctgaataacggcgaactggactggcgtgaaggggcggccgcaccgcttgacgatcaggtgatcgctaccttcgagaaaccgttctcccgtcatggtggtaccaaagtgctgagcggtaacctcggtcgtgcggtcatgaagacctccgcagtgccggttgagaaccagattatcgaagcgccagcggtcgtctttgagagccagcacgacgtactacccgcgtttgaagcggggctgctggataaagattgcgtagtcgttgtacgccatcagggcccgaaagcgaacggcatgccagaattacataaacttatgccgccacttggtgtattattggaccgctgtttcaaaattgcgctggtcaccgatggccgactttccggcgcatcaggcaaggtgccgtcagccatccatgttactcctgaagcctacgatggcgggctgctggcgaaagtgcgcgatggcgacatgattcgcgttaacgggcagaccggcgagttgaccctgctggtagatgaagctgaactggccgcacgccagccgcatattcctgacctgagcagctcacgggtcggtaccggccgcgagatgttcggcgcgctgcgcgagaagctctccggagccgagcagggcgcaacctgcatcactttttaagacgattcgatttgtagatctggcgagagaaaactctgatgaaaaactggaaaacaactgcagaagcaatcctgactaacggcccggtcgtaccggttatcgtggtgaaaaagctggaacacgcggtgccgatggcgaaagcgctggttgcaggtggtgtacgcgttctggaagtcacgctgcgcaccgagtgcgcgctggaagctatccgcgctatcgccaaagaagtgccggaggcgattgtcggcgccggtaccgtgaccaacgttgagcaactgaaagccgttactgaagcaggcgcgcagttcgctatcagtccgggcctgaccgagtccctgctgaaagcggcgaccggcgaaggcaccatcccgctgatcccgggtattagcaccgtatccgagctaatgctgggtatgcagtatggcctgaaagagttcaaattcttcccggcggaagctaacggcggcgtgaaagcgctgcaggcgattgccggtccattcggccacattcgcttttgcccgaccggcggcatctctccggcgaattaccgcgactatctggcgcttaacagcgtgctgtgcatcggcggttcctggctggttccggccgacgcgctggaaaacggcgactacgatcgcatcaccaaactggcccgcgaagcggtagaaggcgcgaagtaatttctgcgccttaaatgacagaagcccggcgcgcgtaagcgaccgggcttttttcatcccttcacgacaaccgcggcggcggcggttttggcgcggctgatggcttcatcgacgttgtcagcaaccgccagcgtaacgcccaggcgacgcgcgccggcgatttccggtttaccgaacagacgcaactgcagacccgcgccaacggcggcctgcagattgctaaaggtaacgttctcactggttagctgcggtaaaatcaccgccgatgccgccggtccatactggcggattgcgccgatcggcagaccaaggaaggcgcgaacgtgcagggcgaattccgacagatcctgcgagatcagagtgaccataccggtatcgtgcgggcgagggagacttcgctgaagatcacttcatcgccacaaacgaacaattcaacgccgaagagtccatatccacccagcgccagtaccactttgcgggcgatctcctgcgcgcgttgcagcgcgagatcgctcatctgctgcggctgccaggattcacggtagtcgccatcttcctgacgatgccctaccggggcgcaaaagtggacgccgtcgacggcgctgacggtgagcagagtaatttcaaaatcaaaatttaccactccttcgacaataacgcgtccggcgcctgcgcgaccgccctgttgggcgtattgccaggcgccgctgagctggtcagccgagcggataaagctctggcctttaccggaggagctcatcaccggcttaacgatacaaggcagaccaatttcgtcgacggcagcgcggaacccctcttcactgtcggcaaaacgataggcagaggtggggatatgtaattcttcggccgccaggcggcgaatgccttcgcgattcatggtgagttttgcggctcttgctgtcggcactactttttgcccggcctgctccagctctacaagtgtgtcggtggcaatggcttcgatctccggcacgatataatctggcctttctaaggcgatcagttcacgcagtgcgtcaccgtgcagcatattgatgacgtgcgaacgatgggccacctgcatcgccggcgcatcgggatagcggtcgacagcgatggtttcaatacccagccgctggcactcaatggcgacttcttttccgagctcgccggaacctaacaacattaccttcgtggccgcgggacgcagcgcggtacctaataaagtcataacctactctcagcgtaaacagaacatggcgcagattataaacgaaaacgtttgcgtctgtctttatacgcgtaagttgagaacggcggcgaaatttgatatactgtatataaatacagtataaaggggctgcacaatggcggttgaaatcaaatacgtcgtgatccgtgaaggtgaggaaaaaatgtcttttgccagcaaaaaagaggccgatgcttacgacaaaatgctcgatttggcagaggtgctcaatgactggctggtcgcgtgcccgctggaattagatgaagctcagcgtgataatatgtcgatgtggctggccgagcgcaaagacgccttacaccacattctgaagtcagggaaattgccggaagcagaagagcacgctgaggcggcggcagaaatgccggagtcggcgattgctgaggctgagtcctctgttgccgatgaaggcgccgcgaaaaagccgcgcaaagcaaaggccgcctgataaccggcgaagcggaaattttcgcatctttagccagccataacatttcctgacatctcgtcgtttaggctgatggcatcgcatctcgcgctatgaggaatgttatggctaactggcttaatcaacttcagtccctgctgggccagcagggcaatcccgtctccgctgaaaagtcttcatccgctaaaaacctgctgcccggcgcattgggcggccttgcgggtttgttggtcgccagcaaatcatcgcgcaagctgctggcgaaatatggcaccggcgcgctgctggttggcggcggcgcggtggccggtagcgtgctatggaataagtatcagcaaaaaatgcgcggccagcacgcggatatcgcgacacagatatcaacagcgcctgcccaggaaccggttgtgctcgatgcgcgcagcgagcggctgattaccgcgctagtcttcgccgccaaaagcgacggccatattgacgagcgtgaacgtcagcatatagaagagcaactgcgcgcggcgaacatcgacgtgcagggccgggtgttgatcgacagggttttaacccagccgctcgacccgcagcggctggcgcaaagcgtgcacgatgggcaagaagcgctggaaatttactacctcagctgcgcggtaattgatatcgaccattttatggagcgcagctacctggatgcgctcggcgacgcgctcaaactgcctgaagatgtccgcgaagagatagaacgcgatgttcaggcgcaaaagcaggcgcttgattcttaaaagagagcgttccgcttgcatcgctggccacttttgccacccttatagacacgacatcgttcagggcgcacgatgccctgagtgattttgtgattccataataagacgcagaagaataacgcatgctaccgaaagccaaacggatcccccacgccatgacgctacatggcgacactcgcatcgataattactactggctacgcgatgacgatcgcgcgcgcccggaagtactggattatctccatcaggaaaatgactacggtaaaaaggtgatggattcacaaagcagcctgcaggagcgggtgctgaaggaaatcatcgatcgcattccgcagcgggaggtctccgctccctatagcaaaaatggctaccgctatcgccaggtctatgaaccgggctgtgaatatgcgatctatcaacgtcaatcggtgctcaaagaagagtgggatgaatgggagattttgctcgacgccaatcagcgggcggcgaaaagcgaattctacaccctcggcggattaggcgtcgcgccgaacaacaaactgatggcggtggcggaagattacctttcacggcgtcagtatggtttacgttttaaggatctgagcagcggcgaatggtcggtggaaattctggagaatgtcactccaggatttgcctggagcaatgactcgcgcttcttatggtacgtgcgcaaacacccgacgacgctgctgccgtatcaggtctggcgtcatgccattggcaccaccgctgataacgatgtgttggtctacgaagagaaagacgacacgttttacgtcagcgtgcataagactacctcccagcagtttgtggttatttatcttgccagcgccactaccagtgaagtgttattacttaacccggagcttcctgatgccgagccggtgtgttttttgccgcgacgcaaagatcatgaatatagcctcgaccattatcagcacgcgttttatctgcgctctaatcgcgaaggtaagaactttggcctctaccgcaccgtgcttcgtgatgaagggcagtggcagacgttgatccctgcgcgtcctgatgtgatgctcgaaggttttaccctgtttaccgactggctggtggttgaggaacgccagcgggcttgaccagcctgcggcagatcaaccgtaaaacgcgagaagtggttggtatcgcctttgacgatcccgcctacgtcacctggcttgcctataatccggaaccggagacctcgcggctacgctacggttattcatcgatgaccaccccggatacgctatttgagctggatatggataccggcgagcggcgggttatcaaacaacaggaagtgaagggctttgacgccacctgttatcgcagtgaacacctgtgggtgacagcacgtgatggcgtggaggtgccggtatcgctggtctatcaccgggaacactttcgcaaaggagccaatccgttactggtgtacggctatggctcttacggcgccagcatggacgccgattttagcgccagccgtctgagcctgctggatcgcggttttgtctttgcaatagcccatattcgcggcggcggcgaacttggccaacagtggtatgaagacggcaaattcctcaacaagaagaatacctttaatgattatctggacgtctgcgatgcgctgctggcgcagggatatggcgaccctaaattatgttatggcatgggcggcagcgctggcggaatgctgatgggcgtggcgattaaccaacgaccggagttgttccatggcgtagtggcgcaggtgccgtttgttgacgtactgaccactatgctcgacgaatctattccgctcacgaccggtgagtttgaggagtggggaaacccgcaggatgaaacctattatcactatatgaagagctatagcccctatgatggcgtctcagaccaggcttatccgcatatgttagtgaccaccgggctgcatgattcgcaggtgcaatactgggaacccgcaaagtgggtggcgaagctacgcgagctgaaaaccgacgacaatctgctactgctatgtaccgatatggattccggacatggcggtaagtcgggacggtttaaaagctacgagggcgtggcattggaatacgcctttttaatcgccctcgcgcaggggactttgcccggcaaggtagaagtgtagcgttactcgccgagatagtgtttaagggtcagacgcagttccgggctcattcggtccaggttattgaacagccaacgtaaatagcctggatcgttttccgccacttccgacaccgctttgccgcgatatttgccgaaggtaaaagtagtcagcagcgccgggcggccggtaatgtcggccatttcatccggcgaccagccggaaacctgcatgatatccaacagtagggcggcggtgatatagcagtcgtacagcgcgcggtggtgatgcaaacccggcggggtggctacgctcagcttgcgcgacttatacaaccccatattgctgtacttaatccccggccacaggcggcgtgccagtttcatagtacaaatccactcgccgttcatttccggtaatacccggcgatcaaagctggcgttatgggcgacataccatgggctgccctggtagtgcggcacgatttcttcaatccagggcttatcggccaccatttcttcagtgatgcgatggattgccattgcctgtgggctgattgggcggtcaggacgcaccagatgactcatgggattctttatctggccgtcgatgatatcgacggaggcaatttcaacaatgccgccctgcaaaccgcaggtttcggtatcgattacgcgcagcatggcttactcctcgccaaaaacaccagcgtaatagaatgcgcgccggttgccaatgggggagccctaaggaatgagcaatcattttgctttcggttcatacggcagacgggaaagtgacacggatgccagacggtgcgcgatcagtctttcacgaaaccagtcgcgcaggtgagccggttgctctcgctcgacgagatcggcaacgaccggcatattgtagcgttctttaaaggcgacgccggccgccgcgagatcaacgttgaccttgtccatttcatcttgcgaaatttttgccagattatttgccatcagtacctccttcattacggcgcaaaagttactaagcgtgacgctgaaaggcaagtcccggatgcttagctcgactatgccattatacagggttattctctgtccaacatacataacaaaaaggaatgacgtttatgcgaaacatcgccggacgcgcgctatacgccgccgtatttctcagcgctatgttaaccaccgccagcgcttttgctcatgctcatctgcaacaacaaatcccggcggccgattcgacggtctccgcttcgccgcaggcgctcacgttaacgtttagtgaaggcgtcgagctctccttcagcggcgtgaccctcaccggcccgcagaataaacctgtcgctaccggcaaattggcccgcagcgacggtaataaggcgcaattaacgctgccgatgactgaaccgctggcggcgggcgagtacaccgtagagtggcatgtggtctccgttgacggccataagaccaaagggcaataccacttcagcgtgaagtaaaccatgctgacgggagtgtatgtcggcctgcggtttgtccacttcatctcattgatgacggccttcggttgcgcgctgtatggcgcatggtgggcgccagcttcgctgcgtcgcctgctgatgcagcgtttttatccactgctgcgctacttgctaatgattagcgctgtttcagccaccctgatgctgatggcacagggcgggttgatggggatggctggaatgatgtctggcaacccacaatctggcgcgctgttatcgggacgcagtttggcggcgtttggctgtggcaggtggtgctggcgtggattgcgctggtggttgcgtggatcaaaccccgtcgcccggcgcgtttactgttgctgctattttgcgcgcagttgttattgatgtcgggcgtggggcacgcggcgatgcatgatggttggcctggcgcattacagcgcaccaatcacgcgctacatctgttttgcgtctcagcatgggccggcgggctgttgccatttgtctactgcctgcgactggcgcgcgggcgctggcgtcaggtagccataaccgccatgatgcgcttttcacgttatgggcatctggccgtggctggcgcgattgccagcgggattggcaatacgctgttgatacaggggcggctgattggcgattcaccgtggggagtgatgttgttgttcaaatgtgcgctggtcgccgggatggtagcaattgcgctggtgaacaggtatgttctggtaccgcgaatgtcaggtaacggctcgtgggcggaacgaactattttacgcactacacagctggaaatggcgcttgccgcgctggcaatacttgctgtcagcctgttcgcgacctggcaacctaattgaattaactggctaaatgatgaaaaaaatcgttctgacaatgttgttactggcaagctcagggccgcgctggcggcgccacaggtgattaccgtgagccgttttgaagtgggtaaggacaactgggcgttcacccgtgaagaagtcatgttaacctgccgcccgggtgatgcgctgtacgccatcaacccgagtaccctggtgcagtatccgctgaatgatgtcgccgagcaggaagtgaaggccggcaagaccaccgctcagccgatttctgtcatccaggccgacgacccgcagcatccgggacaaaaaatgagcctggcgccatttatcgaacgtgcgcaaaagctttgctaataattgcctgtatcacattgttttaaaaataaaaaaccgccgacgtcttgtaataaaacgtggcggttttttgttggcgcaacggattttgtcagcaatttttcaaccgcttttgtcgcggactggaaaacctgtcacagtcaactattcttataaggcaaggcgacttagcctgcattaatgccaacttttagcgcacggctctctcccaagagccatttccctggaccgaatacaggaatcgtgttcggtctctttttatctattattcagcgagttatacacatccattgttaatgctcatacggctgaacgttgagctttttcccttatatcacaacaaagttattcttaacattccctttacaaaaaaacgtgacaatataatcaatagctcacggtaaccaataccgtatcactgtatacgccagcaggttgattgctctgtgaggcgttcacccgcgctttgaagtttgtttgctgcgcgttgccattccccaccaggctgacatctgctgttggcgtccaggcgctaccgtcggttttataaagctgatattgcaggtaataatttgtcgaattaatcgtttggctcatttgccgccaactgccgttaagggcgttgacgctggaaaggttgatgctgtaagccgcattctgcgtgcagcggatagttaactgcccgctgacctcgctaaaagcggctaccagagccgctgtggagaaggcgacatcgggcgcgccatcaatatagcaatagttagtcacgttcatagttatcagaacttgtgaggttaacgtgccatcgtccggtacgcagagccccagcgcgcctatcaggcaatagtgatatttccattcaatggtcagggtgtcgttataggttcccgcagggatattacttcctgctattgtctggaaataaagcggaatggttccgtcactggtattaaataagcctaatagatcaaccagcgcgttaatggtccaggggattgctccatcaatttgatatgccgggttacagccggcatctttacaaactcgataggggatccaggcgttgttagcgctgttataaagtcgagggattttgccacttttatttgctgaatctttgagtgttgcggtaatggtactggtcgaaaaaagcgacagtatgttggtacagctaaagcctgcaccggcgctaaccccttgcggagttgccgccacatcaaacgatctcactgagccaaagttaggcgagctaggcttaatcttgcaatctgcgtgtaccaagccgctgtaacctaaaataaagagtaatgaacataaccaaagaatcgatttcaaagtcatctccgttcattcttagccacagcttagtgggccgatacgttgtggcaccggcgtagattccggcagtgtgaataaagcccggcattcgccgttagccgtgtgaataactaattggttttgctggtttagatgggtaaaccacaccagaccatcataaccgaccacgccagactgctggctggtaagttcctcaacggctgttcccagcggcaaaggatgcccggttttatcaaccagggtaatggaggctgaacgcacgcgagtaaccgggaaatcaaccaatgcgccactggcttcccgcaccgcaatgcgtttttcgacgactttggcctcaacgtcggttggcagcggcagagtgtcgagggtcactttgcctggataccaggcggtggcccacgggatcagcaggtgcccgctattgtcggtggtgccgacttttcgattttcataattgaccgcgacgtcaggatagccagcggtcgagacgacgataaatgaatcgctgattcgtcgcgcgaagaacaggctgctatccatcatgaccaccgagcctgctgcttcaaaccagccctgattatcgtgctgcgagccgtaataaccgccgctcaaggttgaaacatcatttacccaggtcagatccgcctggctgtagcgatctccactgatggagtgggctaaattccagccgagaccgccttccgcaggggctgaacggttgtaggcgacgttttgcccccactcgccggagctggcgcgctggctgcttaactgcagtgaaccgaaactgtcgaagggaatggttatctgcatcatgctggagtaggtgtctgcctgcaaatcgcggttgatgctcaggttaaagctgctgttccgccacaggctgcggctccaggaaaagttcatcagccgggtgcggctgttgtcctgggcctggatatcgaaatatccgaggctaaatgcgccaagcacttttccccatgggctgagacttaatgtcgcctgatcggactgacggctgagggttgtcgttgagcgatagctggagagattggcgaaattctcgctgcgttgaatatgctgatagttaatcccccagatattgccgtagtacgaatagcccgcggagtactggttgccctgcttatcaccctggctcgcactggcagacaggctcaaggtgccaatcgtgccaatagtgatgtcgctgccgataccgccgttggttaatccttgccggtcttcagtatgcgttgacaccgtcagccaattggtcaagccatagcgatagatcgcgctgacggcgccggcaccgtagtcggcatttttagtgccgtaattattacgcaacgcgccgagggtaaaatcgaaatcgctgagtccctggcgtagcagagtgttggagacgtaaaaaggcacgctagtggagacctggcggccaagcgcatcggtcgtgacgatagtcgcttcgccggcgccgctgatgtagggtacgttggtgagagtataggggccgccgttaatttgcgttgagctggctttatagccattgataaagagatcgacactggaggggaccgccgcgctaccggaaagattgagcaaagggtaggtaatcaggtcagggcgtaccgcaaagttacggctgagacgaataccgccaacacgtactgaactactccaggttaaagcattacttaccacatcccccgcctgatagctgagcagactttccgggtcgctatatttccacagcgaatcgtagcgaatatagccttgttggctatcgtcgtgacgagatgaccagttctgtctgatcaccgcattgtttgaaaacaccccggctgggccgaaaaggcgaaattccgtcgaggtgctggtggttcgctcgccgccagaagaagccaggctataggaatcgtagttaaacaacagccctggggtactgatcgcctgcagatactcctgctcgcgactattaccaatatgctgctccggcagccaattatccggaacggttaatttcagcatttggccgggctggtcgtacgccaccttgacttccgctatccctcctacgtcaaccagcgttttgccgtcgggaactgggatccacatctgcttgagtaccgcagcggagacccaataacgatcattaatcactttcaccggcacggtacccgcaggagtgttgccgttgacggaaataccgagatacagcacgtactcctgctgcgtgcctggcgcggccgcaggtgcgggtaacgaatcataggtagccgcccaggccgttgccgaagcaatagccagtagaccactggttccgatgagaagcctcatggttaacgcgctgccggaatttccaccgcctgactattatcagtcaacttcgcaaacaggcgcatcccggatgcattcgccgaacggcctgatgtcgggaaacagacgcgacgtttagccagcacataccccagtaaaccctgagtttgttcgatctgcggctttcctgctgacgttgaccagtagacattactcaatctggcatgttgattcccggcattgttaatacacagatgctgaccgttaagcgaccagctcagcgcggttcgtattggttcgacgttgctttccagcttaagcggttgcgcgccttgcccgtaaacaaacaaaggcagtacatagcgcatgcgcatattcaggccggcggtacttttgtcagtctgttttatcggctgcgctacgggaatttcatcaatcacaattcggtatgatttctcctggccgctggcgaccggagacacacgcatcaggcggataagttgacgttgcccaggctgaacattggcgaaagggggctggagactacctcgctttgatcggcataaatatctttagattctttttgatcccagccgaaaatgcgtagttgtaaatttaccgccgtctcgccgcggttttccagccacagttcagagcctttttcgctggcactgatggtttgaaaaataggccagaccagcaccgagctggcggcccaggcgttagtacttattgctgaacccagcaaaacaacaatacaacgacgaatcatattcaacctgtcttattttaataggtcagcgtgaccgtaacggtatcactgtatgaaccctgcgccggaaagccattcgtggcaaaaaggcggccataaaccgtataagtttgtgtcgtgttggggaatgaggcgacgctgtaagcttgagcgccggtcccccaaacggtagagcggttagcatcctgaaaaagctggtaagccagcgtattgccggtgctgttggacatatagcgttgggccgcggagccgccgttgacgccgtagtcaagcgccagcgagatcgccatccccggcgtacacgcgacgacgatagagccagcgccagcggagctggcgacatcaacattgctataaagcgacgacatggagccaaaatttaaggtgccaaaatcagcgccaggtgttcctgttccgttgccaagcaggcagccggtcgtgatctgggcggtaaccttgaaggttttctgcgcggtgtcagcccagacgggtgtggtcgaaaaaaagaaaatgagtagccaaattgtgcgcgacatgacatccatttctccaccgtgttaccaggttaatgtcgcggtgaccatgtcctggtagaagcccgcagcagggcggttacgcctccttgatccgccggcagcactcgggcataaattgggatttcctgtgcgctacctgtccccgtgatgccgataccggcactggtaaattcggcctgacgggtgctatttgagtaaagccggtaagcaatttgatcgccgtcggcgctttccatttggcgcagtccggttgttcctacatgctggccatcattcaatgtcagcgttgcgggaaggttattgctacagattattgagacagcgctggcgccgccgctgccaatcaaattgctatctatggcgttcaccaaatcgctataggttccgaaatcaatggtaccccaactgttaacgccgcttgcgctggaaccattggtgacggtacagcccgagccgatagtcaactgcaccccgacctgacccgtcaatgtgcctgtggttagccctgctgcagtgacccatggcgcctgaacaagaagcgctgttgtgataaagatgccaggcaaagtgcgcgaaaaagtgttgacgttcatgatgaacctctggattgaaagccgctaagtaaaaccttgtttttgtgggcatgagattaatcccattaatcaacatataatcgctgtcaggaaaaatgcttattttttatattattccttttatttttatttagtcggttttttattctgaaatattggcgtatttctggttttatcttttattttatcgcgcgatttgtattgttttgctctaagtttgccggggagggagaggaaaggaaccgtacaatttttgcaattgttgtgtcagcgcatattttgggcgaaatgccagggaagaagttagtaggggaatgcgtaaaaaaacaacagaaagaagacacctgcacgcaaccagacccatagtgcaggtgaagggtgggtctacatcggaagccgctagtatacatatttgtatgataaataaaataaggcaatgatggaatgctatacaattcatgcggttctctggaagagcaatgaagttattctggggtgattaacgtgggatagagtgaagtttccagatagctgaccaatacccatatctcgtcactgaaaataaaccacagggaactgcctaaaataagcaggataatcagtagcaggaaaaattcagttttactcatgggtcaatggccaacttaaaccgattatcaacaggccacgatattaactaaagaatgtacaaatgaaaacgccgttatttaaaacggcgaatttttttcgtaataaggcgtgaatatttattttatgcttaacatgttagccacctgtacggccatatcatccatcaactggaaacggcggcgatattcggcgcgcttcttgctggcaatactctccagtgattttcgttccagcttcagcggcaagcgccagcggtaactattgtcacgcacaccttcaattgattgccagaattcatcgtagctggcgtggaagtgtcggcctttacttaaacgatagcgcagcgcgcgaaacacatggccattatcactgacgccgtaaatagcctgaatattgcttcgggcggccagcagccagatgaactccaacagcaggcgtttggggaacagaccatagcaggcgcgggtcgcatgtttaatcgcattgtgagagacatggcggcgcggcccctgcaggccgccgatgaccagttgccactctccttgctggtcaatcacactaaatgtagcgctggccaacagttggtggtggctatcgcgaagccaaagggtggtttcaccttcccgctcggctttcccggctgacgaagcaaagagcgtgaagaccgcatcgtctttaccagacagcgtcagtagaggtcgttctgatggcgatatcatggccgacgccagtcgatttccgcccagcgaatcgatatattgatagtggctgataatagcctgagagcgctgacgcgcgttaagatctcgcgctaaatactggcgatgtactttgccaggaagcgtagcctgcgccgccagcaactgccggaaatcactacgcgcagacagggtgtccagcatcttgcgggttggctggtaaaacagcgccgttcgcagcaaaaatttaagccgatagttgcgcttttgccagattggcgcgggcgtgatacgccccattaccagatcggcaattaaatttgagcgttgctgaagtgtgcatgatgaatgcaggctattgtccgtcacgatgtcatacctcgtcattatttgagctttattttaaggatctcatcggacaaccttaatggttcgccagactatatttgcgccttgtttaacgttgattgacgtatgaattttcaacatcgctttcagtcatattttgtataattaagtgaggggtgaaatatgtatcagcgagaagatggttgcgcctggcgtaatatttggttggtgggcgatctacatggttgttttgatttattaatgtcccagttgcgcaagctgaaatttgaccctgggaaggatcttctgatttccgttggcgatctgattgaccgtgggccgcaaagcgtggcatgtctgggtttgcttcgttgccggtggttcagagcagtgcgcggtaatcatgagcagatggccctggatgcgcgtgcgagcggggagatggcgctgtggacgatgaacggtggcgactggtatcaaaccgcctcacgagaacagaaacggttggctgatttgctgtttacccgttgccgggatttgccgctgatcattgaacttcgctgccaggataccacccacgtgattgcccatgccgactacccagctagtcgttataactggcagcttcctgtggatgaacatcaggttctctggagtcgccagcgcttaaccgatcatctggcgggacggcacggggaaattgccggcgcggatcatttctggtttggccataccccgcttaaacgtcgttacgatagcgataaccaacattatattgataccggcgcggtgtttggcggcgagctaacgctggtgcagctacagacggcagcctaaaaatcgctatattccgtcgccggacgccagaagccgtcgataaaatcttctaccgggaaacaaccgccctggcgaattcgttgatcgtccatcgcgacgaggcattgtcgctcgctatcataaacatccactacgatgtcttcacacccgccatccagatagcaaatgaataacactaaggcgaacatccagccctcattagctaataaacatagtgttaagtgtaggggaagttagcgcaacgggggagggatataaataacccgtctcaggcgacgggttcatttgagtcaggcaagacgcatgacccaggcatcagattggcggtcgtaatgttgacggtatagcacagaatgttcgccattaagaatcgcgggaacgctggtttcggcatcccaggcgtccagttgcatacataagtcaggatcggatttacaaggaatgcttaacgttcgctcaccctgtgattcaccgtgcagctcggcgtcgtcgatttcaaacgcgccgattcgtacgttagttttactcatcattcaccccgtttgtctgctgagttgtggtacgaccagttgggccgtcatttttcagcgtagacaacggggagtaaatcgccagtcaaaaagtgcgctttttagcgcgcggtcacgacttcccggtgaatagtttgccgtcgcgtaccagttcgcggggataactatttttcagacgtgacccaacacgtttagcgagccctaaaggcattccctggaaagtgacgatgacatcatcctgctgaggcggcgcctcgggatagacatcgcgcccacgataccactcttccgcttccgttaagctgagctcaaaaggatactctggggcggccagtgagatcaccgcttcatgttgccagcggtagcctttgttatgcgtttcagcgagacgaatcccaatgcgggaaaaacgaaccctgccgataagcgcttccagttcttgtgggaacagccagatttctttatcgcgttgccataaacgaagatgttctgcccattgcaggccaacggcattagcggcggtgacgacagcggcggcttcccgacctttcatcggcgtgaaggggaatttgcccactttgtagcctggcgcaggcagcggatcgatagaggcggttttacgcaggcgggcaacgaaaaaaccctcacaatcaaaaatctgcgggaacacatgcaggaaaccttcgtcggtgagcgcttcgcgggcctgcgggaacagtgaatccagcgtcatgacttcaaccgcctgcgggtaggtttgcagcagccagtttaccacttcctcgttttcttcacgattcagcgtacaggtggagtaaacgagggtgccgccaggacgtagagcgtgaaaggcgctgtcaatgagctcacgttgggtggcggcaatctcctgattactttctggcgaccagtttttcagcgcgtcgggatctttacgcacgaccccttcgcccgagcagggggcgtcgagcaaaatcgcgtcgaaacactctggcagcgcggcgccgaaaacgcgcccgtcgaagtgggtgagggcaacgttattaatgccgcagcggctgatattggcgtgcagcactttcacccggctggcagaaaattcgttggccaggatcccccgtggttgcccatccgggcggctatctgcgtggtcttggagcccggcgcggcggcgacatccatcactcgctccggcatttcgccatcggcgaacagcgccgccaccggcagcattgagctcgcttcctgaatataaaatagcccgctcagatgctcggcggtgctgcccagcggtagtacatcgtcatcatcacgctcgatccagaaaccctcggcgcaccacggaaccggcgttaactgccagccgtaaggggcgaccagttgcagaaaatccgcgaccgttatcttcaacgtattaacgcgaatgctgcggcgcagcgggcgctggcaggcggcgataaattcatcgaaagatagatgcgatggcatagccgcacgcatttgagcgagaaagggttccggaagatagacagcgttttgagccacgagcagcgcaccacaagaaaaaagggggcgcagtttaccataaacgccccggcgcgggacaccgggcgttcaggcattggagagaattaattaggtagcgccgttccccagtcgcgccactctttcggctcgctttccagcagcaggaagtgtttgccatcctgcgcttttggcgccagcggcgttcccggcggggtggcaaaggcgataccgccgcggataaactggttaaaggtacccgtcttcaccactccgccaatcaggccgaagtcaaggctatagccggaagccagccagaacaccgagttattgcgcactaagtactgataacgcttactgatacgcagcttaaccattacgcggtcggacatcgagcccagcgtcagtccggtcacggtgcccacttccaggccgcggaacagcaccggcgtaccaatatcgagcgaaccggcttccggcacttcgacgataatactcaggccgtcgatgtagcgcgaatcggtgatggtggtgtcctgaatctcgaagtcgcggcgcggcgaaccacggccaggttcaacattgatatatgactggaagatcgtgtccagatgttcaacgccggcggcagagatctgcggcgtaatcaccgagaagcgggtgccggcgcgggcaaaagtaccgacatactccggataaagcaccgctttggcctgcacttcattttttgcggtgataagctccagagactggatctggccgatgtcgataccgaggtagcgaatcggcatgcctgccgccattttacccgcatcgaaagcgtgcagcgtgatctggccgcccaccgcgcgggcggcggtctcggaggcgtaaaggatacgtttattgttcaagcgcgcgttggcgctgctgccgttgaggttatcaaagctgatggcgcctttcagcgcgcgcgccagcggtgacgcctgcacggttagcccattaccgtcgagtttcactttcgccccgccttccgcccagaagacgctgttattggtcaacaaatggcgatattccggttttatatgcagatcgatatcgaaagcgttgctgcgcggcttcaccgagatgatctcgccgacggcgaatttgcgatacaacacgacggaaccagcctgcacatcgggcagagtttccgcggaaagactcagcgtggtggtcgggatttcactgaggctattttcctgcgctttttccaggttcgcatacagcggatagcggctctgcatttcccctttttcgccggggatgatgcggatcccgccatcaacccattcgctggcgctggcgccaagtacctgcacgccatccagcccaactttcacatcaaggcggctgttgacgacaaatttgctatcgccgcgtaccagattacgatactccggcgcaatggcgacctggaaagtgacaccctctgcggttagcttgcgttccagcacctggccgactttaacgccgtgcagcattagcggctggccggcggaaacgccatagctttccggcgccgataaagtaacggtggcgacgttcggctcttccagtagcgctttatcggctggcataaccgtaaagtgattgcgcggctcgccgtcaccggggaccagttcaaaagtattgccggtgagcagggcgctaacgcttgggttatccagtgagattttcggcctcttcatttgaatcagcgtcttatcccgaagcagcgtcaccacgctcgggtcgacggtcatctcaccggtaactttaccgccgggattgagattgagtttggttaactggcccacctccagcccttggtacatcagcggcgtagagcccgctttcaacccatcgccgtcgggcagctcaagcgtcaccagcaccccgcgctggctatgcgccagatcctcatacaggttgtactcgtcgttttgtgccgccgctttggagtcgtcaggcgagtcaaaggcaatggcgccgttaactaacgcggagaggttttccaactggactttggcgccgctcaggctgacgtcggctttaatcccggagacgttccagaaccgactgccttttttaaccagattggtgaagcgacgctcgattaatacatcaatcgtcaccccctgattgttggcgttgagagtgtagtcatacacccgtccaaccgggattttacggaaatagaccagcgacccgctgttcagcgagccgagatccggcgcctgcagatgaatcatcaactcgccgttgttgatgcggtatttcggctgtgtatccagggcgacaaaatgatcttccggttcgcctttgcccggcatcatgccgatatagttaccgccgaccagcgcatccagccctgaaacaccggccagagaggcttttggtgtcaccagccagaactgggtgtctttgcgcagcgcatctttcatatcgctcttcacgctggcggaaacttcaatcttgctgaggtccttactcaaagatatatcctgtaccgtaccaacctctaccccttgatagcggataggggttcgtcccggaacaatcccgtttgcggactggaaatcgatggtaatcgtcgttccccggccttcaaagctggtccagatgagccatccggcaatcattagcgcgatgaccggcaacaaccagaatggcgagatacggcgtttggtttttattttggcttcagtcggcgaagcgggcgtttcctgactcatgagcgtcccaaagtaagcggctgtccagccattcaactgcaaggatagttaaaatcaccgcgccgccgaaatagaccgccgccggtcccatggtaaaggccaggagctgatcgcgatttatcaacgacatggttaatgagataacaaacagatccaacatcgaccagcggccgatccaggtaatcagccgcagcagcaggatacgcgtacgtagcccctgttcgcacttgaattgtatgctgaccagcagggtaaataacactataactttggtgaatggtaccaaaatactggcgataaacactacgccggcgatagcgatgttgctgttggcaagtgaaatgatccccgaaagaatcgtatcttcctggcgcgagccattgacgtagattatcgatatcggcagcaggttggccggtagcaggaaaatcatcgacgcaatcaacgccgcccaactacgctgcaggctttgcggccgacggtgatgcagcgaggtatggcaccggcggcagcggccgcgggagtcgcgataaccggtatagtgacagccggtgcaaacctgaagattggtgtcgtagcgcattgccggacgttcgggataaaaacgctcccacaactcttcaacgttcatgtggatgagcgtcaggatgctaagtagggtcagcgcgataaaggcgatcaggccgatgccgggctgcaggaaggcatagtcctgcactttaatggaggcgacgccgatacccaccagataaatatccagcatcacccactctttcagtttgccgagcatcagcagcaccggacgcaggttcatccccagcacgttgccaagccaaaggtaggcgatagagacaaccagcaggacgggcgcaaccaccgcgcagaagagcaccatcgcggcggtaatgggatcgccctggttggtcatctgccagatcccctgcaggacgttggcgtcaatacgcacgccgagcagatgcaaacgcagtagcggctcgctccaggcgaacggcatcagcaacatcattgtaaacgccatactggcgagccgggaaagggaccaatcgcggccgtcgcgtaccttcgcgttgcaccgcggacaccaggcgcattgatttcttttcacaaccggtatgcggaacagcatgtcgcactgcgtacagcgctgatagtgcgcatgcggcgttggcgaactgaccgaatgaacggtaatcttcttcgtcggcgtgattgagggtgtttttatcagcatttattacgttcgggaatgaatgtatcccactatattaacccaggaatgaattcatcttgagcccgaaggcatttaatgcttattttagtaggcatctgcagatgagatagtaagacaactaagtgattaaaaaatgaacaaaacagaattctacgcggatctgaaccgcgattttcaggcgcttatggcaggcgaaaccagttttttggcaatgatctcaaataccagcgcgttactgtttgaacgccttacggaggtcaactgggccggtttttacctgctggaaggcgatacgctggtgctggggccgttccagggtaagctggcctgtgtacgtattccggttggtcgtggtgtttgtggttccgccgtggcgcagaaccgcgtccaacgcgtggaagatgtccatgcgtttgacggccatatcgcctgtgatgccgccagcaattcggaaatcgtctttccgttgcaggtgaataatcagattatcggcgtacttgatatcgatagcacggcgtattcccgctttaccgcagaagacgaacaggggcttgcagagctggtctcgcgccttgaaacgctgattgcggcgaccgattatcaaaaaatctttgcccacgtcgcaggataatcaacggataacgtagcatttagcgatgacgtcattataatgacgcctgttcatgcctgcggcttgttggctacgtccgttgtaatcaggaaatttcatggaaaatcaacctaagttgaatagcagtaaagaagtaatcgcgtttctggccgaacgttttcctcagtgtttcagcgctgaaggcgaagcgcgcccctgaaaattggtatttttcaggatcttgtagagcgagttggcggcgagatgaatctcagcaaaacccagctgcgcgctgccttacgtctttatacttcgagctggcgttatctgtacggcgtgaaggcgggagcgattcgcgtcgacctcgacggcaacccgtgcggcgaactggaagagcaacacgttgcgcatgcgcgtcagcagctcgaagaagccaaagcccgcgttcaggcgcaacgcgccagccagcaggctaagaagcgcgaagccgctgccgcggcaggccagcaggaagaaggggcgcgccgcgagcgtaaaccgcgtcctcagccgcaggctcgccgtaaagaaggtagtgaacagcgtaagccgcgtcctgcagctgccaaagcaccgcgtgaagagcaacgtcttaccccggtgtctgacgtctctgtattgagcgtcggtcaggctctgaaggtgaaagcaggcaacaacgcaatggacgccaccgttgtggaaatcaccaaagatggcgttcgtgtacagctgacttctggtatgtcaatgattgtacgcgcagaacacctggtgttctgaaacggaggccgggccaggcatgaacaaactttttaagctcaccgcgcttgcgggcctgctagcaatagcaggccatgccttcgccgtggacgatatcacccgagtcgatcaaattcccgtgctgaaagaagagccgcagcacgcgacggtgagcgagcgcgttacctcgcgctttacccgctcccattatcggcagtttgatctcgataatgccttttcggcaaagattttcgaccgctatctgaatctgctggattacagccataacgtgctgctggccagtgatgtttctcagtatgcggcgcaaaaaaataaaatcggcgatgaactgcgcagcggtaaactggacgttttctacgacctgtataatctcgcgcagaagcgtcgctttgagcgttaccagtacgcccttaaggtactggatcgtccgatgaattttaccggcaacgacaacttcaacctcgatcgcagcaaggcgccgtggccgaaggatgaagccgagcttaacgcgctgtgggacgccaaggtgaagttcgatgaactgagcctgaagctggcgggtaagaacgataaagaaattcgtgaaaccctgaccagacgttacaagtttgcgattcgtcgcctggcccaaaccaatagcgaagacgtcttctcgctggcgatgaccgctttcgcgcgcgaaattgacccacataccaattatctttccccgcgtaacaccgaacagttcaatactgaaatgagcttgtctctggaaggtattggcgcggtgctgcagatggacgacgactacacggtgatcaattcgctggttgccggcggccctgcggcgaagagcaaagcgattagcgttggcgaccgtatcgtcggcgttggtcagccgggtaagagcatggttgatgttatcggctggcggctggacgatgttgtcgcgctgatcaaaggaccgaaaggcagcaaagttcgtctggaagttctgccggcgggcaaaggggcaaaaacccgtattgttactctgacccgcgaacgtattcgtcttgaagaccgtgcggtgaagatgtcggttaaaaccgtcggtaaagaaaaagtcggcgtgctggacatcccgggtttctacgttggcctgactgatgatgtcaaagtgcaactgcagaagctggaaaaacagaacgtcagcagtatcgtcatcgatctgcgcagtaacggcggcggggcgctgacggaggcggtttcgctctcaggtctgtttatcccatccggcccggtagtgcaggtgcgtgataacaacggtaaggtccgcgaagatagcgataccgacggtgtggtctactataaaggcccgttggtggtcttggtcgatcgcttcagtgcctccgcgtcggaaatttttgctgccgcgatgcaggactatggccgtgcgctgatcgtcggcgagcagacttttggtaaaggcaccgttcagcagtatcgttcgctgaaccgtatctacgatcagatgctgcgcccggaatggccggcgttaggttccgtgcagtacactatccagaagttctaccgcattaacggcggcagcactcagcgtaaaggggttattccggacatcatgatgccaaccggtaaagaagatcgcgataccggagagcagtatgaagataacgcactgccgtgggatagcatcgatccggcgacctacgtgaagtccggcgatatgaaaccgttcgaacctgaactgcttaagcgccatgaagaccgtatcgctaaagatccggaattccagtacatcatgaaagatattgcgcgctataacgccatgaaagacaagcgtaatattgtttctctgaactacgcgcagcgtgagaaagagaatgaagaagatgatgcgattcgtctggcgagggtgaacgatcgacttaagcgcgaaggtaagccgcttctcaaaaagatagacgatctgccgaaggactatcaggagccggatccgtatcttgatgaaaccgtgcatatcgccattgacctggcgcaacaggaaaaagctcagcccccggtagagccgccggttagcaaataactccccaacgggcacaagtgattgtgcccgtttctttttctgtcttcatctatctgtcgactttattcaacaaaaatgtcaacacgctcctgaggtgtcagcgatatgctacaaaatgtaaagttgtgtctttctcgtgacttagcagggcctgatagttgaaaattagcatctgacccatacgatatggggtatcgcatagtgcgttttgttaaatcgaggtaaaaagaatattatgatgcgaatcgcgcttttcctgctgactaacctggcagtcatggtggtgtttggcctggtgcttagcctgacggggatccagtcgagcagcatgaccggtctgctgatcatggcgctgctgtttggtttcggcggctcgatcgtttcactgttgatgtcgaaatggatggcgctgaagtcggttggtggggaagttatcgaacagccacgtaatgaaactgagcgttggctgatgaataccgtcgcacagcaggcgcagcaggcgggcatcgccatgccgcaggtggcgatttatcacgcccctgacatcaacgccttcgccaccggcgcgcggcgcgacgcttctctggtcgccgtgagcaccggtttgctgcaaaatatgagccgtgacgaagcggaagccgttatcgctcatgaaatcagccatattgctaatggcgacatggtcaccatgacgctgattcagggggtggtgaacaccttcgttatctttatttcccgcgttatcgcgcagattgcggctggtttcctcggcggtaatcgtgaagatgaaggtgaaagcagcaacggtaacccgcttatctactttgccgtcgctactgtactggaactggtgttcggtattctcgccagcatcatcaccatgtggttctcgcgctaccgtgaattccacgccgatgccggttccgccaaactggttggccgagagaaaatgattgctgcattgcagcgtttgaaaaccagctatgaaccgcaggaagccagcagcatgatggcgttctgtatcaacggtaaagcgaaatcgatgagcgaactgttcatgacccatccgccgttggacaaacgcattgaagcgctgcgtagcggagaatatctgaagtaatctgccgtgcagacgctgaaaataaaaatccgcagctttccggctgcggattttttttggccgctcgttatcaggcggcgcgcggttgagttacgcgtagcccgctgatggcggcggcaatgaccgccagggagccggccagcagaagcgcggtgtgggtgccgctattgcctgccaggttaaacagcagggcgaccagcgcggcgccgctactttgccccaataaacgtgcggtacccagcataccgctggcgccgccgctgcgatggcctggcgcagaggagacaatggtatggttgtttggcgactgaaacagtccgaagcctgcgccgcataacgccatccgccagataatatcgagatcggaaggtgaagagggtaatagcgcaaggccaaacaagccgcaggccatgatcagcagtcccattgcccccaacaaccctgcatgaaccttctctatcaggtaacccgccagaggggccattaccatggtcgctaatggccacggcgttaacagcaatccggtctctacttcgctgcgtccgattacggtttgcaggaaaaagggcagggaaaccatcgccagcatctgagcgcaaaaagaacagatcgaggtgcagatagagagcgaaaagatcggaattcgcagtaaatcaaccggtaacagtggaaccggcatgcgcaactgccggcgaacaaagaagaagccgataatcagcatagtaatgacctcggccagcaccagataaccggattgcccttgggcaaaaccgccgagcgccgtgatgagcagcccgaaggtgagggcgttcataatcgcgctcggcagatcgaaacgggtaattctgctggcgccgctattgggcggtaaaaagcgcatggcgaggaagatagaaataatccccagcggaacgttgattaaaaacagccattgccaggaagaaagcgaaagaatagcggctgcaatggtagggcccgcggcggaggagacggcaacgacgaacgagttaatgcccattccgcgacctaactgcctcttcggatagataaggcgaatcagcgccgtgttgacgctcatcagcgccgcgccgcccaggccctgggctacacgcgccagtgttaacatctcgaggcttcgggagagtgcgcaaatcagcgaggtgatggtaaacaccaccagacctattttatagattcgtcgataaccaaccatatcgccaagaaacgagagtggtagtagggcgatgacgatagcgatttgataggcgttaactatccagattgaagatgccggcgaggcgttcaggtcggtggcaatcgtcggtagggcgacattggcgatagcgccgtcgagtacggccattgtcaggcctaaaacaatcgtcagaatggcgccgtagcgctgcggtgccggcaggccatccaaaagttttttatccatgtgaagtttaagtcttagaggaaactattttctgattaatgattttagcattgattattcaaccataagtcgcagatttgtaaccaactcgcagaacaacgattgcgacggtcataatgtgaatttataataaaaaacagttctgaattttataaaacagttacgatgaggtgaacaatggcagctgctgatatggataaacagccagattctgtctcttcagtattaaaagtttttggcatcctgcaggctttgggcgaagagcgtgagattggtatcaccgaattgtcacagcgtgtgatgatgtcaaaaagcacggtgtatcgctttttacagaccatgaagtcactgggttatgtcgcgcaggaaggcgagtctgagaaatattccttaacactgaagttattcgagcttggcgcgcgggcgttacagaacgttgacctgatccgcagcgcggatatccagatgcgtgaaatttcgcgtctgaccaaagagacgattcacctcggcgcgctggatgaagacagcatcgtttatatccacaagattgattccatgtacaacctgcggatgtactcgcgtattggtcggcgtaatccgctgtacagcaccgctattggtaaagtgctgctggcgtggcgcgaccgggcggaagttgagcaaatcatggaaggagtggagtacaaacgtagcaccgagcgaaccattactgataccagcgcgcttttgaaagtgctggaccaggtacgtgcgcagggctatggcgaagacaatgaggagcaggaagaaggattacgctgtatagcggtgccggtcttcgatcgtttcggcgtggtgattgccggcctgagtatctctttcccgacgctacgcttttctgaagaacgtttgcacgaatatgtggcgatgctgcacgctgccgcgcggaagatttccgagcagatggggtataacaattatccgttctgatagtcagtgggagctacagcgcgatgctgtagctccgcttgtattaaccctgatcgatgaccttcacgcttttgcgaagaatcgggcagttggtaataccgataatgccgctatctgaatgaacatattgtgcggtagtgataccttgcgccgtcaggtatttacactgcagacccaacccgccagcattctgattgctgccaattaatacgccataaccgcttaataatacgccaatccagacgatcgccagtatgacaatagagcgaatgatcaatcgcattgttgcctcattatttgtatgatcctgccgtttattctggcacgaacattatttgatacaagtctatgattcctaaacttgcctttcgtattacagttagccgcggtttaagaaggccatgttatcctggcaacatctgattatggtacggagagtggagtgaaaaaattacgctgggttttgctgattgttgtcatagcgggttgtttactgctgtggactcagatgcttaacgtaatgtgcgatcaggatgtgcaatttttcagcggcatttgcgctattaacaagttcatcccctggtaagacatttttgtgccgacggattttcttctgccgcgcgggtggtagaatgaacgccttctctttgaggtggtgaaatgagtgagttattgaatcctgggattgtaagtctggcgtctctggcgctttctgttgtactgctgctggtgggattgctgttgtggttctttgtgaatcgcgccagttcacgtagcaatgagcaaatcgaactgctgcagtcgctgctggatcaacaaaagcggcaaaccgcgctactgcgccgtctctgtgaagccaatgagccggagaaagaagaggttgctgaatcctctgcgtttgagaaggagaaaaacgacgacgatttcattcgtctcgttgccgaacgttaagttgaagaacaggtgtgcacatcgcgtgcgcgcctgtgagtgctacaaaattttgctataacttattcttatgtaattcaagattccgttcctggccgttcagtttaatgaattaaacatctactctgtatttcacatattgaataatcttttgagctaatcaaaaaaagtaataacgaaacgtttctattgcctgatagcaatagtttgtcattaatgtttcattattaacgtctatcttagcgtatatttgtgccataccgagtaaggagggttaattaacactactccagggagatttaaggcgttgttccttttgtccaaacctcttttgcgcatcattatgcacttcatgccacaacaaccccttaaatatggcagttcgtatacgtacgtacctggacgaacagaagttgttgagctatggtgaaaaagttgcatttatcaggcatacgttattgtttgtttgataacgatgcaaagataagccaggcgcggcaaagacgcataaatgtgcaggcgatcaaatgatttcctgataatttgtgcgaacgatcgtgacacgtttaaaaatggcttgccattatttacgttgtgtgtgataacacgtttcgggttaaacgaggtacagttctgtttatgtgtggcattttcagtaaagaagtcctgagtaaacacgttgtcgttgaataccgcttctctgccgaaccttatattagtgcctcatgcagttatgtgtcagttttatctatgtaagcacctgcgggtgaagaaaacagtttaaggaattttgcaaatggcaaagattaaaggtcaagttaagtggttcaacgagtctaaaggttttggcttcattactccggctgatggcagcaaagacgtgttcgtacacttctctgcaatccagggtaacggcttcaaaactctggctgaaggccagaacgttgagttcgaaattcaggacggccagaaaggtccggctgcagttaacgtaactgctatctgattcaagaccactcatcttgtaagaaagcctcgcaatcgcggggctttttagcatctgttgcaaagtatttccaatttttcccctccgacgcgctttgttgcaaaacaacacccttattagcactgtttagcagtctgttttgccaattttctgttaaatcaggtggttgcaaaataatgctggagctacggtgcaaaagaataaaagtaagtccgccacaaattttctccctgtccgttttgggttgctgtgtgtggcgattttgggatgtcttggatttctgctggcgagggtaggttggctgcaaatcgtctctccggataatctggttaaacaagaagatatgcgttcgctgcgcgaagaacccatcgccgtgatgcgcggaaccattagcgatcgtgaaggacgcccgctggcggtgagcgtgccggtaagcgctatctggatagacccgcagaccatgctggaaaagggcggcgtcggttatggtccgcgctggcaggcaatggcggaagcgttgcatattgatcttattgacctttctcatcgggtgcagtcgcacccgcatgcccgattcctctacctcgcgcgtcaggttaatccggaacaggcggagtggatcgataaattacacctgccgggcgtttatctgcgcgatgagtcccgccgtttctatccagccgggcacgtcgcggcgaacctgctgggctttaccaacgtggataaccagggatcgagggggtagagaaaagctttaacaagcaactaatgggaacgcctgggcgccggttggtgcgcaaagaccgccacggtcatgtgatagaaaatattaccgagcaggccgccgttccggcgcacaacctgcaacttagtatcgacgagcggctgcaaacggtgacggaggatgcgctggataatgccgtgcggtggaataaggcggaatccggcgcggcggtattaatcaagattgatactggcgaaatcttgtcgatggccagttacccggacttcaatcctaataaccgtgacagcgcccagctcgatgattttcgtaatcgcgccatcagcgatacctttgagcctggctcaacggtcaaaccgctggtgattatgaccgcgctgcagcaggggattgtgcagccggatagcgtggttgatacccacccctttacgcttgatggtcatcgaattcgcgacgtgggttattatcccgagttgacgctcaccggtattttgcaaaaatcgagcgataccggggtttcgcacctctcgctggcgatgccggtgcagcatcttattgatacttacaaggcctttggctttggcgacccgaccgggcttggcttgaccggtgaaagctccgggctgatgccgcatcgacgctattggggcgagttggatcgcgccaccttcgcctttggctatggactgatggtgacgccgctgcagttggcgcatgtctacgcgacgatcggcggttacggtatcgagcgcccgctctcgataacccggatcgatccgccggttatgggtacgcgagtcatgccgcaagagatcgtgcatgaagtggaacatatgatggagagcgtagcgctgccgggcgggggcgggacgaaagcggcggtacgtgattatcgtatcgcggtgaaaaccggcacggcgaagaaaattggcccagacggtaaatacatcgataaatacgtcgcctacaccgccggcgtggcgccggccagtcagccgaagtttgcgttggtggtggtgataaacgaccccagcaacggtaaatattacggtgggcggtatccgcgccggtgttcagccagatcatgggcgatgtgttacgtctggaaaacgtgatgcctgatggtatgccgcagggttctgagaatcttattgtcatgcgtaaccacgaggattcggctcccgcgctgtaacagtggtctgcgagggcgaatagcgctacactttcgccctttcagcgacaccggagttaccatgtcttatacctgtccactatgccacgcgccgcttagccgcagcgcaaatagctatatttgcccgcagcggcaccagttcgatctggcaaaggaagggtatgtcaatttactgccggtacagttcaaacgttcacgcgatccgggcgatagcgctgagatgatgcaggcgcgccgcgtcttcctcgagggcggatattatcagccgctgcgcgaggcgatttgcagctatctgcggactttcgcgccggtcgaattgctggatatcggctgcggcgaggggtattacacgcatgctttcgccgggattgccgtacgcagcttcggcctcgatgtgtcaaaatcggcgatccgcgctgcggctaaacgctatccgcaggtggaattctgcgttgcttccagtcaacgattgccgtttgccgatcgctctctggatgcggtcgtgcgtatttatgcgccctgcaacgccgatgaactggcgcgtgtggtgaaaaccgacggttgggtgattaccgccacgccggggccgcgtcatctgatggagctgaaagggttgatctacgatgaagttcgtctgcatgaacagaaccgggaagtgatgccgggctttacgctgcgtcatgagcagcagttggcctatccgatgcagttgagcggcgcgcaggcggaagcgttactgcagatgacgccgtttgcctggcgagcgaaaccggaggtacgagaattactgcgccagcaggagtcctttggctgccagaccgatttcatgattcactgctggcagcgcgaggcgtaagcgctaggggcgaaatggctccacagaatctgcgcgccgataccgattagcacgataccgccgagaatttcggcccgtttaccgagcagcgggccgataaaacggccaaccataattcccagcgtcgacatggtaaaggtggcgcagccgatagccagcgcggtggcgataatattgacctgcaggaaagcgagacccacgccgaccgccatcgcatcaagactggtggcgaatgcggtagtcaccagtagccagaagccgtggcggcgcggcgcttcacactcgtcatcatcagcgccgcgaaaaccttcaatcaccatacgcccgccgagaaacaccagcagcacgaacgcgatccagtggttccactccaggacaaactggctggccaacatgcccagtccccagccgaccagcggcgtcagggtttcgatcgcgccaaaaataaggccagtacgcagtgcttcggagaatttgggtttatgtagggtagcgcccttaccgatagaagcggcaaacgcatccatcgacatgccgaaggcaagaagaatagtggcagatatgttcatgagcgtgtcctgaccggggaatatccatatgacacatcgctgcccccagtaaacatacgcggagcctgagcataacgtacagcagtgatgtatctatggtctcgcctgattgaacgaccgctcaacccgtacgtgccacgttttgcaacgagtatgttgacacgtacattttccacctggcggaaaatcggctactccccaacgacgggcgcaaccttaacatattttgagaagataaaacaatcacagaaaaataatattagcaacaataaatgataacgattttcatttaaaatattaagtgaaggattggttaaataatataacgaggtgaggcgggaaaatatagccatggctatatattcccacagtaatgactggcgaaaatatagcgcaggctatatttataacttattgactggtaacgagtagtttgtatattttttccagatcgtcgatatttcgtacgcgaataagcaagcgccgctgctctaattgcatcaccagtacgccatcttccgataaattcattgctttaatacgcggatattcaatccacacgttggcaaagaaaaaaccgctcttcttgaacaggattcgcggcgtacggatccagaacagatataatcccattaatgccagcgcagataataaccaggtggtgattatttcgccgtggttggcaatgttgttatagatgagaatcgccgtcaggccaacgaaaatcatcccgtcgacgcgtccacgacgcagcagggggattgacagcagggtggggccattgcggcgcggcatgatgaattggtcgtagatagcgaaagccaccagggcgacgataaacagaatgagcaccagctccgtgattgccattgatcctccagccagcgtggacctgcatacaggtacacgttttaacgctaaaaaaaagccggggacaaagctgcccccggcctactacgtgacgattattgacccagcaggccgaccgcgtagccggcaataccgatgacgaagaagccaacgatgatccacagcgggttgactttcttacgcagcagccacatacaagcgaaggtcagcagcagcggcaccagtcccggcatcagctggtcaaggatggtctgcacggtggtcacacgagtctggccatcctgaccggtgatagtggaaaccaccagtggaatattgacgtgcgtccatttgttaaccagggctcccatgacaaacaggccgaggattgaggccccctcagtcagtttctgcaggaagccgccgcccatatccttaacgatgtccacgcctttacgatagccgtatgctacaccgtagtagcgggtcagcagacgcacggcgttgaacaggatgaagaacagtagcgggccaagcaggctaccgctcatcgcgataccggcgccgagcgcggcgaataccgggcgaacggtaccccagaagatcgggtcgccgacgcctgccagcggccccatcaagccgactttgataccgttgattgcgccatcgtcgatttccgcgccgttagcacgctgctcttccatcgccagggttacgccgagtaccggcgccgcgacgtacggatgggtgttgaagaactcaaggtgacgcttaatcgcctgcttacgcgcatcgttgttctcagggtacaggcgacggattgccggaaccatagagaagcagaagcccagcgcctgcatacgttcgaagttccatgaaccctggaacaggttagaacgaatgaacacgccacgaatatcactctgagtgagttttttctcggtggtatttttagtcatatcaaccatttcgctcacctgttagtccagttcattatcgagatcgttgttaccagccgcctgagccggggcacccgcaacgcggttatatttcgggctcagctgaatgtagagaatggccatgacggcaccaatcacacccagcgcaaccaggttgaaattggtgaaggccgcggtgacgaaaccgagatagaagaacggcatcaggtagcccgcgcgcatcatattgatgaccatcgcgtaaccgacgacgacgatcatgccgcccgcgatattcagaccgccagtcaccacttccggaatggcgttcagcagaccctgaacttcgctggtgccgacagagatggctacgataaccgccgggatggcgatacgcatcgcctgcaggaacagcgaggaaacgtgcagccaggatatggccgtcaggttaccgttttcagcggctttatccgccgcgtgctggaaggcaacggtgatggtacgaacgataatggtcagaacctggcctgccgccgccagcgggatagccagcgcgataccggcgccaatgctttggtggccagcaataaccagtacggtagaaataatggatgccagcgcggcatcaggcgcaaccgccgcaccgatgttcatccagcccagagcgatcatttccagcgtaccgccgatgatgataccggttttcatgtcaccgagaacggcgccgattaacgtacaggcgaccagaggacggtggaactgaaattcatcaagtaccgactccatacccgcaatacacgcgacgatgaacaccagcacaatctgaagaagggtaatctccattgtacttctcctgttgataaagtcttaaagtgaaaattggctcacgagcgccgggttaattacccaccttggcgatcaaatccatcattttcagtttctggtcggtggaaactttacgcgcttccagttcaataccgcgggcattcaacttcttgaatgcttcgatatctgtagcatcgaccgaaatcgcgttattcacctgcgttttaccctgacggaaagccataccgccgatgttgacgctggtaattttcacgccgccttcaacaatacgttcaacgtccgttgggttagtgaacaacagcatgacgcgctcgccggcgtatttcgggttgttgtagacgcgaatcatcttcgcgacatcaacaacgtgagcggtcacgcccggaggagccacctgggtcagcagcgttttgcgcaccgtatcggcggcaacttcatcgctgaccacgataatgcgggtgacgttggtctctttggtccagcgggtcgcaacctggccgtggataagacggtcatcgatacgcgccaggccaatcaccatgtaatcctgcggacccatcggtttagcgggcgttgccgctttcggcgcggcagtctgaaccggcgccgctttttcaaccggtttggctttcagcgctttcacgccttcgctaccggtttccaccgccagcgccaccagctcatcaaacgacggatcgtcatcgcgtgccataaaggtttcaaccagcatcgggacgttgacgccagcgatcacttcatagttttctttatcaacaacaatgcggcttgccgcgttaaatggactaccgccccacgtatcaacgaggaacagcacgccttttgtggtatccagttttgccagctgtgcattgtacttttcgatcagcgtttcggcgttttcgccgggaacgaaatcgatccagccaacgttttcctgctcgcccaacagcatttctgcggttttcagcagttgttctgcagcccaaccatgtgtgcctattacaatagcaatcgtcacttgctacctccgttattatggtgaatgcatcatctggtttgatacatcctgaatcactcttgtggaaaaatcgattcagtaagggtgtaagatctaatttaatgactaccgggaattattttagatagtgaaaaaataattaatgtgatggagctccgtaaattacgcttcaataatcaataatttcgcagcgcaaaaaatagccttagctattgcaaagacaggtaaatttttgccaattctgcgctatattttgctatgtttagcttccgtttaattactcaggagtatagggcatagcccgccgtatggaccgtcatcgacgtcttttcaccttcaggcactcgtctgccgcctctacctcacacgcttttttaccagcaactattgtttcgccggtgcatgacatcgcgatgactaccgctgtcgttaacgggagccgctcatggaattcttaatggatcccaccatttgggctggcctgctgacgctggtggtcctcgaaattgttctgggtatcgataacctggtctttatcgcgattcttgccgataaactgccgccaaaacagcgtgataaggcacgtatcatcggcctgtcgttggcgctgattatgcgtctggggctgctctcggttatttcgtggatggtcactttgaccaaacctttgataagcataggcgacttctcgttctccgggcgcgatctcatcatgctggtcggtggtatcttcctgcttttcaaggccacgaccgaacttcacgagcgactggaaaaccgccagcatgatgccggtcatggcaaaggctatgcgagcttctgggtggtagtgcttcaaatcgtggtgctggatgccgtcttctcgcttgatgcggtgattaccgccgtcggcatggtgaaccatttgccggtgatgatggctgcggtcgtaatcgcgatgatcctgatgctgctggcttcgaagccgttaacccgcttcgtgaaccaacatccgacggtggttgtgctgtgtctgagcttcctgctgatgattggtctgagtctggtggcagaaggctttggcttccatattccgaagggctatttgtacgcggcaatcggcttctcgattactatcgagttctttaaccaggtggcgcggcgtaactttatccgccaccagtcgacgttgccgctgcgtgcacgtaccgctgatgcgattctgcgcctgatgggggtcgtaaacaggcggctgtcgcgcatgatagcgatagcccggcggcagtgccggtgccggaaggggcgtttgccgaagaagaacgctatatgattaacggcgtactgaccctggcgcagcgctcattgcgtagtatcatgactccacgaggcgaaattagctgggtggatgctgagcagagcgaagacgaaattcgtcgccaactgctttcttccccgcacagcatgttcccggtttgccgcggcgagcttgatgaaatcatcggtattgtacgtgccaaagagatgctggtggcgctggaagcgggcgagaacgtcgctgcaatggcttccgcttccccggcgattgtggtgccggaaacgctggatccgatcaacctgctgggcgtgctgcgtcgggcgcgcggcagctttgtcatcgtcaccaacgaatttggcgtggtgcagggactggtgacgccgctggacgttctggaagcgattgccggtgagttccctgacgccgacgaaacgccggaaattgtactggatggcgagggttggttaatcaaaggatcaaccgacctccacgcgctgcagcaggcgctgggctggacgacctggtcaacgaagacgatgatattgctaccgttgccggactggttatctctgcgaacggtcatatcccgcggataggcgatgttgtcgaactaccgccgctgcagttcaccatcgttgaagcaaatgattaccgcgtcgatctggtacgggttattaaaaccgtccacgataacgacgaagaagagtaatgccgaacccgccgggctaaacttgcccggcgggttgttttttacccccagtcgccgccagacggtgcttctcttccgccagccagcgcggaaaatcctccaccggtaacgggcgggcgtaataatatccctgtagtaaatccaccccgtggctacgcatgtaaatcttctgttcctgagtttcgacgccttcggcaatggtgacgattttgagccggtgcgccagggcgataatcatatcggtcaccgtcgcgttgaccccatcaatgccaatggcgccggtataagatttatcaattttcagtacatccgggcggagtttttccagccaggacaaagaactgttaccggtgccgaagtcatcaatggccagctggacgcctttaaaatgcaggtgttccgccatgtgatgatcgccctcacgcaggacatcgcgttcggtgagttcgaccaccagctgttggaccggatttgcgctgaaccaataggtgtgcagatcgcgcagcagctcgccgttgctgaaatgacgcgccgccacgttaataccaatatgaaaattggcatcctgcgggaaatgatgtagccggcgggcggtttcagcgatgacgtagcgggtaaggggactatcaggttgtcgccttcagcaatcggaataaaaacatccggcgagatatttccgcggcgcggattgttccagcgcagcaatatttccacgccacaacactcctgagtgcgtaaatcctgcagcggctggcaccacagctcgaattcgtgagcggcgatacccagggttatttcgcgcgagaaagtcattcgtcctgcggtcgtcagccaggcgataccggtcatcaacaggctgaacatcagcgccagcggtaattcagcgggcaactcttctaaggccaccgcggaggcccccgggccgctgatgttgatggtaaagggaaactggctggaactttgttggtaaattatcggcagacccggcagccgatcgcttgcaacgacgccaacatcgctgagaaaactcttgttgcctaccgtgaggctgatgtcgcttatcaacgatgatttttctttgagaatcaattcgccaagcagctcgatattgataattaacaacgcgccgtcggcgccgcttacggaggagggataccactgaatcagcaccggcgtgcctttgagcagcgagttatctgttgaaaaggccagcagcgggttgactgccggcaacgttggctgcagctgatgaatggccacatagcgtgggccaaaaatgctggagcagtaggccatcccggactgaacaaggatgattgagcgtacggtctgtagagttgctgcggttttacgcagctcaagatgcacatcctgacagggtttgcccaccatactcagcagggtagcgtgttttgccgccagcggttgcaggatattgtccatcgcgatcaccatattgcgggtcaccgtctggatgcgctgttgattttggctacgctgtgaaataaatcggattgtcagggtgacggcaagcgtcagaaatgcaacggccaggcacacaagaatgcgcttgcggcgatatgtcgaaatgaccttctgtgcattttgcatgcgcggcgccctgtcggctaaatagaggaataagagtaacagccggcttaaagcaagtgtagtgggtaagataagttggtgggagaaaaagaaaaatgcgcccggaaagggcgcatttcacagacgtggtttagtcacactggactttgatcgccaggccgccgcgagaagtttcgcgatatttggcgttcatgtctttacccgtttcgtacatggtctcgataactttatcgagagagacgcgcggttcgctggtgcggcgcatcgccatacgcgcggcgttaatcgccttcacggatgcgatagcgttacgttcgatgcacggcacctgtacttgcccggcgaccgggtcgcaggtcagaccgaggttatgttccatgccgatttccgccgccacgcaaacctgctccgggctggcgccgagcagttcagccagacccgccgccgccattgaacaagcgacgccgacttcgccctgacagccgacttcggcgccggaaatggacgcgttcattttgtacagcgcgccaatcgcgccggatgccataaagtagcgaatataaatatccgggctaacggattcgataaagtgatcgtagtaggcgagcaccgccggaacgataccacaggcgccgttggtcggcgcggtaacgacgcgaccaccagcggcgttctcttcgttgaccgccagcgcgaacatgttcacccagtcgacaacattcatcgggtcgttagacagtttatcgctggctaccagcagacgacgcagcgctgaagcgcgacgcggcacgcgcagcggccccggcagcacgccttcggtgttcatgccgcgatcgatacaggcgcgcatggtttgccagacgttttcaaaataggcttctatctcttgcttgctgtgcagcgccagttcgttttgcatcaccatgccggagagcgacagaccggtttctttgcagtagcccagcatttcctgcgccgatttaaacggatacggaacctgcagttcgttcgcgtcttctttgccgaaatgctcttcgtcgacgataaaaccgccgccgattgaatagtaagtcttgctgtagatttctttctcaccggcccacgcatggatagtcatgccgttttcatggagcggcaggttgtcgctacgaaaacgcatgccgtcatccgccgggaaatcgacctcatgttgcccgtttgccagcagcagacggccgcgggtttcaacgtcgcggataaatgccgggatcgcgtcaatatcgaccgttgcaggcagattgcccgccagtcccatgataatggcgatgtccgtgtggtggcctttgccggttaatgaaagcgacccatagacgtcaacggcgacgcgcgtcacttcattaagcaatcccttttcgaccaggtcatcgacgaactgtttaccggccttcatcggccctacagtatgggaagatgagggaccaatcccaccttgaacatgtcgaatatactaatcacgataacactcctgacagggttaccgcggttgcggtaacgatgtaataactgcgcatagtgtaagagggaaccgggttgtcagcttaactattcacatgaattaaactaatggataaccttggttttactaatagtgagagcggcttctcattacttattatagctaagggcgagtgccgatttgcagcgccagctcgcgaataatgccggcggtcattccccagacaaaataatgttggtaccacgatagccagacgcgatgtgaattaccgcgccgatggatgtccagcgggtggtaacgacccaggcgcagcgcctcttccagcggcatttcaaacaccgcagacacctcgtcctgactggcatgatagtgcaaatccgggggattatgccgacaaccggcgtcacctgaaagccggtgacgctgtcgaccggcggcagcacgccaatcacttcaacggcttccggcgggatcgccacttcttcctgcgcctcgcgcagcgcggcggcaatcaatgttgcgtcggtgttatctactgcgccgccgggaaggcgacctggcccgcgtgcttacgcagcagcggcgaacgctgggtcagcaacagtcccggctgcggacggcggacgatcggcaccagtaccgccgcctggcgctggttcagcgactgcggcgagggctgcgggcgcagcagttgaaaacgggaaagaaagtcgtccaggtcgagggcgttagccgccatgttctagctctccagttgatgcaggatacggttaactttatcaaaagtttcctgatattccgcggcttcttcgctgtccgccacgataccgccgcccgcggagcagtacagttggccctgccaggcggtaatcgtacgaatagtaatgctggtatccatattgccgcacaggctgagataaccaatgctgccgcaccatgcgctgcgccgctgcggttcaagttcatcgataatctccatagcgcgaactttcggcgctccggtaatggagccgccagggaaggccgcgcgcagcagatcgctggcatcaagcgtagcaggcaatcgtgcggtgatggtgctcaccaggtgatgcaccgccggaaaaggttcaaccacaaacaattccggtacgcgaacgctgcccggcacggcgacgcggccgatatcattgcgcatcagatcgacaatcatcaggttttccgcgcgatctttcggcgagtgggcaagcgttgccgcctggcgtacgtcttcctgcggggaatcgagtcgcggcagcgtgcctttaatgggtcgcgtctggatgtcaccctgatgcagttgaataaaacgctcaggggacaggcttaaaatcgccccttccggcaggcgaataaaggcgctgaagggcgcgcgattggcggcattaagcctacagaatgcctgccattcgtcgccgcggtagcgggcctggaaacgttgcgccaggttgacctgataacagtcgccgctgcgcagatacgcctgcacctgacggaatttttcgccgtattgctggcggctcatattcgattgccaactggaggtcagggagaaaggttcagccggctggcgcgtttgcgattccagccactgcaggcgctgttgcggatcgtcgtagctcagcagcgatacctgctggcgttgatgatcgacaatcagcgcccagtcataaatgcctaccgccatctccggcagggtgatatcagcctgcgcttgcgtgggaagacgttcaaagcggcggccaagatcgtagccgaatagccccagcgcgccgccgagaaacggcaggttttcatcagcccgcggcgttaactggcagctctccaactgctgttgcagcagctgcagcggatcgtccagcgagatatattcgccttcaccgtcgcagacacaggtttgctcgccgcgggtaaccaacgtcgtgcgcggttcggcgacgataatatcgaaacggctatacgggtggtcggcaaagccggagtgcagcagcattgcccacggcgtggcgcttaacggcgcaaaatagcgttcggcggcatccgggcgccagggcagggtaataatagcggggacaacattaacctcgatcctaatctgccgcccactggcgaaatggcggacggcgtgaaataattacgccccacaatgtagcaggagtgagtgatgtttgcaggtttaccttcgctgagccatgagcaacagcaaaaagcggtcgaacgtattcaggaattgatggcgcagggaatgagcagcggccaggcaatcgccctggtggccgatgaactgcgcgccacgcacaccggcgatcggatcgtagcgcgcttcgaagatgacgaagaagacgagtaattacgccgcggcgatgattttaatctcaactttatactgcggcttcatcagggtcgcctgtacggtgcagcgcaccggcgcgtgaccggcgactacccaggcgtcccaggctttattcatcgccgcaaaatcatctttgttggccaggaaaatggtggcatcaagaatacgtgacttattgctgccctgtttttccagcaccgcgtcaatttgcgccagggtgttggcggtctgttcaaacgcgtcggcgtcgagattttccggcaccccggtgtagtagatggtctggttgtgaatcaccacatcagaccagcgtgcttcagcatcaatacgcgtaattgtcatttatcattcctctttgttctatccattttgctgcggcaagactgccacaatgttccgtccgcgtcactacccgggctggcgaaacgccgtcctccctgacataatcactgtccaaataaccaggggcaacgtgatcgacgattttgcagcagacggccagctggccatggcgataccgggatttaagccgcgcgaaccgcagcgccagatggcgatcgcggtgagtgaagccattgacgcctcccggccgctggtggtggaagcagggactggcaccggtaaaacttacgcgtatctggcgcccgcgctgcgcgcgaagaaaaaggtgatcatctccacgggttcgaaagcgctgcaggatcagctctacagtcgcgatcttcccaccgtcgccaaggcgctgaaattcaccggtaaactggcgctgttaaaagggcgctcaaactacctgtgccttgaacgccttgagcagcaggcgctggcgggcggcgatctgccggtacaaacgttaagtgacgtaattcttctgcgctcctggtctaatcagacgcaggatggcgatatcagcacctgcgccagcgttgccgaagattctcaggcctggccgctggtcaccagcaccaacgataactgtctcggcagcgactgcccgttatataaagattgctttgtggtgaaagcgcgtaagaaggcgatggatgctgacgtggtggtggtcaaccatcacctgttcctggccgatatggtggtgaaagagagcggctttgccgaactgatcccgaagcggaagtgatgatattcgatgaagcccatcagctgccggatatcgccagccagtattttggccagtcgctctccagccgccagctactggatttggccaaagacatcaccattgcctaccgtaccgaactgaaagatacccaacagctgcaaaaatgcgccgatcgtctggcgcaaagcgcgcaggatttccgtctgcagttgggcgatccgggctatcgtggcaacctgcgcgaactgctggcggatagccacattcagcgcgcgctgctgctgctcgatgacgcgcttgaactgtgttgtgacgtcgccaaactctcgcttggccgctcggcgctgctcgacgccgcctttgagcgcgcaacgctctaccgtggacgcctgaagcggctcaaagagatcaatcagcctggctatagctactggtatgaatgcacgtcacgtcattttaccctcgccttgacgccgttaacggtggcagagaagtttaaagaggtgatggcgcaaaagtcaggaagctggatctttacctcggcgacgctgtcggttaatgacgatctccaccactttaccgcccgcctcggcatcgatgacgcacagacgctgttgcttccaagcccgtttgattatcaacatcaggcgctgctctgcgtaccgcgcaatttaccactgccgaaccagcccggcgcggcgcggcatctggcggccatgctgaaaccgttgatcgaggccaatgacggccgttgttttatgctgtgtacctcgcacgccatgatgcgcgacctggcggagcagttccgcgccaccatgacgctgccggtactgctacaaggggagaccagtaaaggtcaactgctgcagcagtttgttagtgccggcaatgccctattagtggcgaccagtagcttctgggaaggggtcgacgtgcgcggcgacacgctatcgctggttattatcgataagctgccctttacctcaccggacgatccgctgctcaaagcgcgaatggaagactgccgactgcgcggcggcgacccgttcgatgaagtgcagttgccggatgccgtcattaccctcaaacagggcgtggggcgcctgatccgcgatattgacgatcgcggcgttctggttatctgtgacaaccggctggtgatgcgcccttacggcgccgtgttcctggccagtctgccacccgcgccgcggacccgcgatatctgccgggcagtgcgctttctcgccgtgccgccggcaaggtaatccgtcgcaaaatgtggtaagctgcgcgccattttgtaaatcagctatccccaatggatttcgggcggtgcggcggcggtgagtccgtcagccgagaaatataccgcctgcaataccttgaatatgtaacgagagcgtgaccacccatgcgaattttggctatcgataccgccacggaggcgtgctccgcggcgctgtggaatgatggcgccctgagcgcccattttgaaatttgtcctcgcgaacacacccaacgtatcctgcctctggtgcaggaggtcctcactgaaagcggcactacgctgaatgaacttgacgcgctggcctttggccgcggtccgggcagctttaccggcgtacgtattggtatcggtattgcgcaaggactggcgctgggcgctgagttgccaatgattggcgtctctacgctggcgacgatggcccagggcgcgtggcgcaaaaccggcgctacccgcgtgctggcggccattgacgcgcgtatgggcgaagtctattgggctgaatatcagcgcgacgaagatggcgtctggcacggtgaagcaacagaagcggtcctcaaaccggctgcggttgccgaccgcctggcgcggctttccggcgaatgggctaccgtcggcaccggttggcaggcgtggccggatctggcgaaagagagcgggttgaccttgagcagcggtgagatcgaactgccggcggcagaagatatgctgccgctggctattcagctgctggcggcgggaaaaacagtggccgtagagcatgcggaacccgtttatttgcgaaacgaagtggcgtggaagaaacttcctggccgcgagtgaatctcagtagagagaagactgagagaaggagtcgcattatggcgggtcaaaaaaagggcgttcgttggctgttcgctgcggcggctgtcgttgcgctaagcggctgtgtatcggtgccggatgctattaaaggcaccagccctacgccgcagcaggatttagtgcgagtgatgaacgcgccgcagctatatatcggtcaggaagcgcgttttggcggtaaggtcgtcaacgtgcagaatcagcaggggaaaacccgcttagagattgccaccgtaccgctggatagcggcgcgcgaccggaactgggcgaaccttcacgaggccgtatccttgccgacgtgagcggtttcctcgacccggtcgatttccgtggccagttggtaaccgtagttgggccaattagcggcgttgtcgacggtaaagttggcgcaacgccgtataaattcatgttgatgaacgccaccggctataagcgctggaacgtggtgcaacaggtggtgatgccgccgcagcccattgacccgtggatgctcggcccgcgcccctggggctacggatacggcggctggggttggtataacccgggcccggctgaggtcagaaatgtcgtaacggaatgattttgttgtttttataatggaatagaaacagcggctagcccgctgtttcgtgttttttagtctcataagaaaaataaatagtgacgcgcttcgcaacctgaaaaacgcctaattaataaactggtacgctgagttaatataatgttaacaagatgtttgttgatcaggggctgtgatgacgacgaataactatttcagaggtgaagcagtgaaaaaggtttggctaaaccgttatcccgcagatgttccggcggagataaatcctgaccgctatcaatccctggttgaattgtttgaacacgccaccacccgtaatgccgatcagccggcatttatcaacatgggcgaggtgatgacctaccgtaagctggaagagcgcagccgcgctttcgccgcttatctccagcaaggattagggctacagaagggcgatcgtgtcgcgctgatgatgcctaacctgctgcaatacccggtggcgctgtttgggatcctgcgtgccggaatgattgccgtcaacgtcaacccgctgtataccccgcgcgaactggagcaccagctcaatgacagcggcgcggcggcgattgtgatcgtttccaacttcgcacataccctggagaaagtggttgataaaacccaggtaaaacacgtcatcctgacgcggatgggcgaccagctctctaccgccaaagggacgttggtcaactttgtagtgaagtacattaaacggctggtgccgaaatatcatctaccggacgccatctcatttcgcagcgccctgcagcatggctaccgtatgcagtacgtgaagccggaaatcgtcgcggacgatctggccttcctgcagtacaccggcggtaccaccggcgtggctaaaggggcgatgctgacccaccgcaatatgctggctaacctcgagcaggtgaatgcgacctacggcccgttactgcaccgtggtaaagagctggtggttaccgcgctgccgttgtaccacatcttcgccttgaccatgaactgcctgctgtttattgaacttggcgggcagaacctgctgattaccaatccgcgcgatattccgggtctggtaaaagagctggcaaaatatcccttcaccgcgatgaccggggtgaataccttgtttaacgcgctattgaacaataaagaattccagcagcttgatttctcttcgttgcatctttccgccggcggcggcatgccggtgcagcaggtggtagcggagcgctgggtgaaactgaccggccagtatctgctggagggttacggcttgacggagtgctcgccgctggtgagcgtcaacccgcacgatatcgactaccacagcggcagcatcggcctgccggtgccgtcgaccgaggccaagctggtcgatgatgacgataatgaagttgcgccgggtgagccgggcgagctttgcatcaaagggccgcaggtgatgctgggctactggcagcgtccggatgccaccgatgaaatcattaaagatggttggctgcataccggcgatattgcggtgatggatgatgaaggcttcctgcgcatcgttgaccgaaaaaaagacatgattctggtttcaggttttaacgtctatccgaatgaaattgaagatatcgtgatgcagcactccggcgtacaggaagtagccgccgtcggcgtaccatccggcagcagcggcgaagcggtaaagattttcgtggtgaagaaagacgccgcgttaaccgaagaggcgctgattactttctgccgtcgccatttgaccggctacaaagtaccgaagctggtggagtttcgtgacgagctgccgaaatccaacgtcggtaaaattttacgacgagaactgcgtgacgaagcccgtgctaaagtagacaataaaggctaagtaacgagtgagtcgccaggcgccggctaagccggcgttttttatgggcgcaagttaagagagtatgatttgaactatcagatgatcaccaccgacgatggcctgcgcgctatctgtgaagcggcaaattcggcgcccgcggttgcgctggataccgagtttgttcgcacccgcacctactatccgcagcttggtttgctgcagctgttcgacggcaaacaggtttctctgatcgatccgttgaccatcaatgactgggcgccgatgcgcgagttgctgcttaaccaaaatgtcaccaaatatctgcatgcgggtagcgaagatttagaagtcttcctcaacgcgttcaacctgatgccgcagccgctgatcgacactcagattctggccgctttctgcgggcgcccgatgtcgtggggctttgcttcaatggttgaagagtattccggcgtcgcgctggacaaaagcgagtcacgcaccgactggctggcccgtccgctgaccgagcgtcagtgcgaatacgcggccgccgatgtctggtatctgttgccgatcgccagcaaattaatggcggaaaccgaccatgcgggctggctgccggccgcgttgaacgagtgccacctgatgcagcagcgccgtcaggaagtccttgacccggcggatgcgtggcgggaaatcggcaatgcctggcaactgcgtacgcggcaactgggctgcctgcagttgctggcggagtggcgtctgcgcaaagcgcgtgagcgtaacctggcggtgaactttgtggtacgcgaagagcatctgtggagcgtggcgcgctatatgccgaccagccttggcgagcttgatagtctgggtttatccgggagcgaaattcgctttcatggcaaaacgttgattagcctggttgagaaagcgcaggccttgccggaatcggcgctgcctgagccattgcaaaacctgatcgatatgccgggataccgcaaagcctttaaagatattaaagcgctggtacaggaagtgagcgccgggaagggcgtgagcgccgaactactggcgtctcgccgccagatcaaccaactgctgaactggcactggcagctgaaaaccaaaaacggcgagccagagctggtttccggctggcgtggtgaattgatggccgatcgtctgaacgcgctgctcaacgactatcctcgctagcgcctggcgctattcaggccataaaaaaccggccgcgcgttgcgtggccggtttttttaatgctacggcgagatgccgttaatacgacaacagggtcagggtttcgactcttcagcttctggcagggtcacgttcagctcgagaatcgaaatatcaccatcacgctgttccagctgtacgctgaccatctcagggtctatctgtacgtatttacagatgacctccaggatatctttgcgcagctgcggcaggtaatgcggttccgcgtcgccgcggcggcgctccgcgacgatgatttgcaggcgttctttcgcaatgttagccgtgttcttttttcgcgagagaaaaaagtcgagtaatgccataatttatcctccgaacaggcgtttgaggaaacctttcttctcttcttcgatgaagcggaaaggacgttcttctccgagcagacgatccacagtatccgcataggctttacctgcatctgaaacggtatccagaatcaccggctcgccctggttcgatgcgcgcagtacagactgatcttccggaatcacgcccaccaggttgatgcgcagaatttccagcacgtcttccatgctcagcatgtcgcctttgttcacgcggcctgggttgtagcgcgtcagcagcaggtgctctttaatcggctcgtcgccattttccgcgcgacgggatttggaggccagaatgccaaggatacggtcggagtcgcgtacggaggagacttccgggttagtggtgatgatggcttcgtcagcgaagtacagcgccattagcgcgccggtttcgatgcctgccggggagtcgcagacaataaaatcgaagtccatctttttcagttcttcaagaactttatctacgccttcgcgggtcagagcgtctttatcacgggtctgagaagccggaaggatatagagattctcagtacgcttatctttgattagcgcctgattgagagtggcatcgccctggataacgttgacgaagtcataaaccacccgacgctcgcatcccataatcaggtcgaggttacgcaggccgatatcgaagtcgataacgacagttttctttcccttctgggccaaaccagtagcgatggccgcgctggaggtggtcttaccaacgcccctttacccgaagtcacaacaataatgcgtgccatagaaattccttgttaaaaagggattaattgaacggttgaattgtcaaagcgccgtcgcctaaacgcaggcgcgccgctttgccataaaattcagctgggatgttatcgctcagccaatattcccctgcgatggataccagttccgccgagaggttagtacaaaatatttgggcatctctgtcgccgcttgcgccagccagcgcacgtccccgcatcatgccatacacatggatgttaccatcagcgataagttccgctccggcactcacatggtttgtaacaattagatcacagtgtggcgcataaatgcgctgaccggaacgtaccggcagatcaatcaaacgcgtttttgtgatcggcgtaacaactggtggcggttcaacaggttccggcggcgcctgacgaacgattttctcttttccttccgtcagtagcgggatcccggcgcggtcgatttccgttttcaggcgggaaattttacaaccgctcacccccatgatgcgtaaaccggtggcgacgatagcttcatgcatcgggcgccagtcgacgctctcttcaatactgctgatgttgaccacgaccggtgcatgacgtaaaaaagcgggagcctgggcgattttgtcttctaacgcctgacgaataacctcgggatttgcatcgtgcaaatgaacgacagataaggtgaagctactgcccttaagttcgattggcgtatttgacatcctggccttactcaatttgctgtttatcatccgccgaagtgcggtgatattccgaagactaaaaggcatgttatagtcactcatatattgaggcaagtgaccacgggtctaattccgagtaaaactatgttttgtgtgatctatcgaagtactaaacgtgaacaaacctatttatatgtcgaaaaaaaggacgatttctcgcgcgtcccgccggaactgatggcaagcttcggcaccccgcagatgaccatgctgctgccgctcgacggtcgcaagacgctggctaacgctgacctcgaaaaagtaaaacaagcgctcgtcgatcagggctattacctccaacttcctcccctcctgagaatctacttaagaaacacctcgcggaacaggggaataaatccgattaacccattgagggaaaataatgtaccaacatcataactggcagggcgaattactggattatccagtgagcaaagtggtttgcgttggcagcaattacgcaaaacatataaaggagatgggcagcgcgatgcccgaagaaccggtgctgtttattaaacctgaaacggcgctatgcgatatccgccagccgttggtacttcctgaaggattgggatcggtgcatcatgaggttgaactggcggtgctgatcggcagcaccttgcgccaggccagcgaagaccacgtgcgtaaggcgattgccggatacggcgtggcgctggatctcaccctgcgtgatattcagggtaagatgaaaaaggccgggcaaccgtgggagaaagccaagggttcgataacgcctgtccaatctctggttttattcctgccgccgagttcaacggcgatccacaaaatacgccgctaagcctgaagattaatggtgaggttcgccagcaggggacgactgcggatatgattcataagatcataccgttaattgcctatatgtcgcgcttctttaccttgaaagcgggcgatatcattctgaccgggaccccggacggggtcgggccgctcgccagcggcgatgagctggaagttggcttcaatggtttgacgttatccacacgcgtgctgtaacgtccgcttgccgccttttgaggcggcaaaacttgcatcggcgtgccagactggttataaggtgcaccctgaattgtaatgacggacatcccaatgagcgaacaacctttctggcaacaaaaaacactggatgaaatgaccgacgcggagtgggaatcactgtgcgacggctgcggacagtgttgcctgcataagctaatggatgaagacaccgacgagatttacttcaccaacgtcgcctgccgtcagctcaatattaaaacctgccagtgccgcaactacgagcgtcgcttcgagtacgaaccggactgcatcaaactcacgcgtgataatctgccgaccttcgaatggctgccgcacacctgcgcctatcgcctgctggcggaaggtaaagcgctgccgcactggcacccgctgctgactggctcaaaagtggcgatgcacggcgaacgtatttccgtgcgccatattgcggtaaaagagtccacggtcgtcgactggcaggaccatattttaaacaaaccagactgggcgcaatgacacgttgaaatgaaagggaaaagtggttactgatttagtgcctggggcatggatggggcaaaacctccaaaatttgcgttgagtatcgccatctgattactgttgttgtcagtcatccattttccgtaaacgttgtaaaccatttgcgctgacgtgtggcccatctgtgaggcaatgaagttgaaactgtgataatagcactaaagagtttgagggttttaaccagtatgtacatagtgtaaagattatgccgctaatattaaaacgtctgatggtgaaactcagcaaaagtagatgcgaaaaaattttaaacaataacttcaggagagttatttactggccttgggtgttaaatactagagaggaagcgagtacttttttgttaagcgatgggagcaatatcaccccatcaagtttaacattatgcgacttctttaactttgctggatgtaggtttgataattttcctgcctatggctatgccttttacttcgacatttttataaagccaagttgatataacataagtaatcggaactgatattgcagtcgcgataataaatctcaatatagggttgagatttataaatgttggatactcaataagtatacctattgttggaagtactatcatcaaatggagtaggtatactgagtatgagacttcaccaagaaatcgactaagcgttatggatagaaacgcttttgtggtatctgctatcaatttgaatggggatttatttttatgagggtaaagtaaaatggccatgcctgctacaataattatctcaatcaccattctggtaggtgtgattaggaatccgatggccaaggcgctgattggagcaattaaagctaccagtgaataatatattttattatccgatgctgccttatatataagcattccagcaatgaatagaggaagtttgaaggcaatcattgatggcctggtgaattcattaaaatattcaggtgccagttgcgaggcaacaaaacaacttgccattataaataatgatgacttaatatacccaaaacgcataattattaacattatgaaggggaatagagcataatactgcatttcaagaccgatactccagtctggtattgttgttctggcagaataataggggagaaaaccaaaagcaaaagaaatatgtgcgaagaaattaactacggaggtatcagcgtacttttcaggatcagtttgcgttgaggcccatacgttaccaatagcttctctgtaattaccgaattgctcgcctaaaagaagtgcgatgataagtaaaacataaaacaatggggcaattctgaaaaatctccgcatccagaatgatgtcattgtttttactgagttccatggttctatatgctgcctctcagtgtaatttttagccatcaaatagccagataagagaatgaaaatatcaacaccaatgctaggactacttaaaattggaatattgcattccgttaaattacatatatgaccaagcacaacccaaagtgacgcataacctcgcaaaccatcaagctctggagaccaatttttgctctgagacatttgctttaccagtgagattaaattgaagtggttaatcaatggtaacaaaaaagcaagttaattgtaaatatttattttgttatgcttgtttttgtaactatttgttttatatatgaatttatatcccatgtattaattgtgggcaattgccatatgttacccggttagaaaggagttatatgtggttaggatgatttgattattttgctacatcattttatgcgttaaagatggtaagaagcaaataagctatcgattcttgatggagctatcaatataagctctgagaattttactccagacttcgtatccagaggtgttaaggtgagtgccatccgatgtatactccattttcaaaacaccatttggcgataagatagcgtttaaatcaaggaatggggttcctgatttacttgagaaggctttaagtaagtcgttaattttattgattgacgtattttttcttttcctcttgtcgccagagagaattgtagactggataatcacattaatgtttttttgtttcatatgattagtcatgagaataatgtttttagcaatttcttctggagggacttttctggttacatcgttagtacctgccattataaacaccgttttcgcgccagtcctttcaatgtcattaatcctgtcaagcatgccggaagtgtcatctccgctgattcctcgatttcctattaagtatccggggattaagttattccattttccatttttagttatgctatcgccaaacataatataatcatattttccagggtgtcgggaatgtgtttttttgacatttaaatatgcggggctgttttttactgaagtatctgcattagagtgattacaggaaaaacatataaaaaccaagcttgctataatatttgagtgtttaaatttcataatttccattttaatcttaataagctatgcacttaaagctattgtgaattattcaatgtgcactaattgtatttgattagtcaacgtttatatctaggtcgttatgtttttcggaattgttgaagtggactgtgcaggaaaggttacccaattactcatatcaagaagccagtgaggcgatggatgtcgattccatctcatctcccttgaaatctgagaatgccatatcagacgagagtttcagagccgtacgccttatgaaacgatgcgatagcgttcctccgacgtaagttagattaccaggcgaaatacacgggcgtttgataaaatatttgggcttgggcagttatcaaccacgtaaaattacatattgagcgcccacaatgcgtcagaactcatcattataacgatgggatgacacccttagagttggtaaaaaggtagcaatcctaatgtaaaacaaatggttaggattacttaaaaacatcaaaatattaaaaccgggcattccctgcctgcgcggcccggttctttattcgcattaatatcccatcattctcaatgccagccagataatcccgcccataataaagcgcatggaaaaataacaacactaagcgaacgccagccgtttctactcatcggaaaccccacatttaagtcatcatcaccaggtgcgtttggcatttcatcatcggcgcggggcggggaactttaggaatatttgtaaagcagatgtagaaaaaaatagacccggcgcggtggccgggctgagagggcgttgacgagctgccaggtcaccccggcgcggtggctgcttgggtcgatcagatgggcaggaaactcatcattaaatacgcgacgacaacgcagattagcgtcatataccagactatgctcatggtgacttatcccatttcagactcaagaaagacgagcctttcgggtaacgactttaaacatccggatgtcgatgatcaaccgcttgcgcatcaggggattagcttttctttgcgtggaacaggccgtcttcgccgtggctttcatcctcaacccagaagttaatattgaattgggcatcatcgctgagctcgatacggtgccaatactgcggtgggctggtggcgaactgcccggcgttaatgacgactttcatctccggttcggtagcctgctcgtcatgaaaaccgtagtaagttaccgttccttccattacgcacagctgaccgaaaacgttagcggcagtattgtgatgggtgagcagcgccgccggaacattttccttagtgaagaacggagtggagcgtttaactttccagttagccgggatacgcaggtgggacatggtgagctcctcagtggatgcatataagatgtatttaatatgcatctttaaagggggtcgtcaacttacaggcataaaaaacgcccccgaaggagcgtttatcatctggcagggtaacttaacggccgaacagatcgcgttttttagccttaaatggctgagcgatcagcaccagcagaccgataaccagataagcggcaaagatacctaccagccactgcggcatctccagcgtcaggaattcccactggcgcacggaacagtcgccggtggcgacgaatacctgcggcagccatttatccagcggcagccacgtcgggaagcgcgcggcgaaatcgcaggtctggaacggggaagggtgcagctgaatcatggtgtgttcccaggctaactgcagtccgcgcagggcgctgtacagccagatcagcagcgcgacgtagcgcaacggggttttcggcgcgatagcgcccaccagaccagcgcccataatgccaaacagagcgcagcgttcataaatacacaacacgcagggctgcagcagcatcacgtgctggaaccacagcgccactaattcaagtataaaagcggttaacgccatcaagagccaggcgccgcgtccccgtgagcactggtttaagtattgcaacataatcatttccctggaacatgctaaatcatggcagtgtaaacgaaaactaccgcgacgccatccgctagtcggaaaatattacgtaaatgaatattcgttacccgggcggacccgggtaacgtgctggacaattacggcagtgtcggcgtggtcaaccagccgtggctgagcatccactgggtggccggcatcagcagcgtttcgacgcacagcaggccgaccagcgttagcacgatggtatatggcaacgccatccacaccattctgccataagagaggcggatcagcggcgccagcgccgaggtcaacaggaacagaaacgcggcctggccattgggggtggcgacggagggcaggttagtaccagtattaatggcgaccgccagcatttcaaactgctgcaggctgataacgccatgttccagcgccgctcttgcttcgttgatatacaccgtaccgacaaagacgttatcggagatggacgacagcaggccgttaaacagatagaacagcgatagctgagcgtgtggcgaagcctgcaggacgaactcaatcactggggcaaacagatgctgatcgataatcaccgccacgatggcgaaaaagacagtcagcagggcggtaaacggcagcgcttcggtaaaggctttaccgatggcgtgctcgtcggtcacgccggaaaaggtggtcgccagcacgatgacggagagcccaatcaggccaacttccgccagatgcagggcgagggcggcaatcagccacacgccgatgataccctgggcgataaggcgcatccgatcctggcggctgcggctctggcggctacggtcgtcgaaatcctgcaataccttacgaaccggtattggcagcggctcgccgtagccgaacagacgaaatttttccagcagcaggcaggtcatcaggccgcataggataaccgggagagttactggcgacatccggataaagaactcaccgaagtgccagccggcggctttggcaataatcaggttctgcggctcgccgaccatggtcatcacgccgccgagcgcggtaccaacgccggcgtgcatcatcaggctgcgtaaaaagctgcggaactgttcgagtacgtcgcggtagtgctgatcgatgtggctgtcatcaagcatgtcgttatcatcaggccgcgcggaggcgacgcgatgataaataccgtaaaagccgaccgctacactaatgaccaccgccacgacggtgagcgcgtcaaggaaagcggagagaaaagcggccgcaaggcagaaggccagcgacagcagcatcttgctgcggatccccagcaacaggcgggtaaaaataaacagcaatagctgcttcatgaaatagatcccggccaccataaacatcagcaacagcaggacttcgagattattggctatttcttcgcggatatgttcggggctggtcataccgatcagcaccgcttctatcgccagcaggccgccaggcaacagtgggtaacatttgagcgccatcgccagggtgaagataaattccaccactaacagccaaccggcaacaaacggttgcagataaaacgccagcgggttaaccaccaggaagataatcaggagaagcttgtaccagtcaggcgactggccaagaaaattgcgccacagggcgcggccataagacatttccacgacagaggtccttccgtcaaacaacaagattttatgcgtaactattgcaagattaccagttgagcaaaaagggaagcaactttcttcgcggcgcatgacaggtaatggaaggcgctaagcaaaagctgaaaatgaaacggcgatccccttttaattactttcagatgctatctggcttatggctgctctggtatgatgagtgcaatttgcaacgctgtgtaatggaaatcttactatggtcattaaggcgcaaagccctgcgggtttcgcggaagagtacatcattgaaagtatctggaataaccgtttcccgcctggatctattctccctgctgaacgtgaactttctgaactgattggtgtgacccgaaccaccctacgcgaagtgttgcaacgtctggctcgtgatggctggttgactatccagcacggtaaaccgacgaaagtgaataacttctgggaaacttccggtctgaatatccttgagacgctggcgcgcctcgaccatgatagcgtgccgcaacttattgataacttgctgtcggtgcgcaccaatatctcgacgatttttattcgtacagcctttcgccagcacccggacaaagcgctggaggtactctctaccgcccgtgaagttgaagatcatgccgacgctttcgctgaactggattacaacatcttccgcggtctggcgtttgcctctggcaacccgatctacggtctgatcctcaatggcatgaaggggctgtatacccgcatcggccgtcactattttgctaacccggaagcgcgtagcctggcgctgggcttctatcaccagttggcgaaagtgtgcgaagagagtcagcacgataaagtttacgaaatcgtccgcgcctatggccacaacagcggcgagatctggcatcggatgcaaaaaacgctgcccggcgatttagccatcaatatgcgctaagtacggcttactctataaaaatgcccggataatccgggcattttgttttcagcgcttacagcgcgttctgccgcggcggggtgcgatccaacagctcaacgctgccgtcggcattttgttgctcaaggatcacgtcaaagccccacaggcggtgaacatgtttgagtacctcgcggcggctcttatccagcggtacgcggttgtgcggcacatagcgcagcgtcagcgaacggtcgccgcgcaggtcaacgttccagacctgaatattcggctcaagattactgaggttatactgcgccgacaacttagaacgaatttcccgatagccttcctcattatgaatggcggaaatctccaggtaattgttgtggtcgtcgtcgaggacggtgaacaagcggaaatcgcgcatcaccttcggcgacaggaactggctgataaagctctcatctttaaaatcgcgcatggcgaaatgcagcgtctccagccaatcggaaccggcgatatccgggaaccagtagcgatcttcttccgttggcgactggcagatacgtttaatatcctggaacatggcgaaacccagcgcgtaggggttgatcccgctgtaccacgggctgttgtagggcggttggaacaccacgttggtgtggctgtgcagaaactccagcataaagcgctctgtcacttttccttcgtcatacagatgattgaggatggtgtagtgccagaatgtcgcccaaccctcgttcatcacctgagtctgcttctgcggataaaaatactggctcaccttacgcacgatacgcaggatctcgcgctgccaggactcaagcagcggcgcgttcttctccatgaagtacagcaggttctcttgcggttcggaaggatagcggcggcttgcctcgatggctttttcctcttcccgttttggcagagtacgccacagcatgttcacctggctttgcagatactcttcgcggcttttctgtcgcgccttctcctcctgcagagatattttctgcgggcgtttgtagcggtcgacgccgtagttcattagcgcatggcaggagtcgagcaatttttcgacttcatcaacgccgtagcgctcttcacattcggtaatgtatttacgcgcgaatataaggtagtcgatgattgagctggcatcagtccagctgcggaacagatagttgtttttaaagaaggagttgtgcccataacaggcgtgcgccatcaccagcgcctgcatggtaatggtgttctcctccatcaaataggcgatacaagggttggagttaatgactatctcataggccagaccttgctgaccgtgtttatacgcctgctcggtttcgataaattttttcccgaacgaccagtggggataattaattggcatcccgacgctggagtaggcgtccatcatttgttcggaggtgatcacctcgatttgatgcggataggtgtcgagacgatacagcttcgccacccggtcgacctcggcgagataggtttccagcagttcaaaagtccagtcgggtccatcgcttaaccgggtggtgtccctgttcatggaatcaatcgtagccattagcgcgccctcgttgttggtggttctctctttgtggagaacctcttatcaagcatagaacacgccataacaaactgcgtctgcgggtaatttcttttcttcgcgatttcgcaatcctaaaggccttcatttaacatctttgcagcattttatactgaggaaaaataaagcgcagcacgagatcgtaaatctctggtgtcagtgctggtgcggtttggtgtgagataagtcaccataaataaagcgtatgttgaataatattttcatctgggttatcaatttgtaattagatgattgttctttaactattacggagtggctatgcgagtcgtcatactgggaagtggggtggttggggtagcgagcgcctggtatttaagccaggcgggacatgaggtgacggttatcgaccgtcagccagggcccgctgaagaaaccagcgccgccaacgccgggcagatctctcccggctacgcggcgccgtgggcggcgccgggcgtgccgctgaaggcgattaaatggatgttccagcgccatgcgccattggcgattggccttgacggcacgcagttccagctcaagtggatgtggcagatgctgcgtaactgcgataccgccactatatggaaaacaaagggcgtatggtgcgcctggcggaatatagccgtgattgcctgaaagcgctgcgtgaaaccaccggtatccagtatgaaggccgccagggggcaccctgcagcttttccgcaccgaaaaacagtatgaaaacgccactcgcgatatcgccgtgctggaagaggccggcgtgccgtatcaactgctggaagccaaccgcctgctggaagtcgagccggcgctggcggaagtcagccataaactgaccggcggcctgcgcctgccaaacgatgaaaccggcgattgccagctcttcaccacccgtctggcggcgatggccgaggcggcaggcgtgactttccgctttaatacctccgtcgatgcgctgcttcacgaaggcgatcggatagccggtgtgaaatgcggcgacgaaattattaagggcgacgcctacgtgatggcgtttggttcttactcaaccgcgatgctcaaagggctggtggacatcccggtctatcctctgaaaggctactcgttgactattccgattgccgaagagagcggcgcgccggtatcgactatccttgatgagacttacaaaatcgctattacccgtttcgataagcgtattcgcgttggcgggatggctgaaattgtcggctttaataaagagctgctgaagccgcgccgcgagacgctggagatggtggttcgcgatctgttcccgcgcggcggctacgtcgagcaggccaccttctggaccggcctgcggccgatgacgccggatggtacgccagtggttggtcgtacgccgtataaaaacctgtggctgaacaccgggcacggtacgctgggctggaccatggcctgcggttccggtcagcttctgagcgacctgatctccgggcgtacgccggcgatcccttatgatgatctggccgtggcgcgttacagcccgggctttacgccgtctcgcgctcagcatctgcatggcgtgcataactaaggagcctccatgtctcgtccggtaaaagccagcattgatctgtcggctttacgtcagaatttacagattgttcgccgcgccgcgccaggcgcgcgcgtttgggcggtggtgaaggcgaatgcctatggccacggcctcgcgcggatgtggcaggcgctgaacgccgcagatggctacgcgttgctcaatctcgaagaggcgatcctgctgcgggaaaagggctggaaagggccaattctgctgctggaagggttctttcacgccgatgaactggcgctgctggataagtatcgcctgaccaccagcgtacacagcaactggcaaattaaagccctgcagcaggctaaactgcatgcgccgctggatatctatcttaaagtgaatagcggtatgaataggctgggctttatgcccgagcgagtgcataccgtctggcaacagctgcgatcgctcgccaacgtcggtgaaatgacgctgatgtcgcatttcgctgatgcggaaaaccccgagggcatcgtggagcccatgcgccgtatcgaacaggcggcggagggctggactgcccgcgttcgttgtcgaactcagcggccacgttgtggcatccggaagcgcactttgattgggtgcgcccgggaattgtgctgtacggcgcatcgccgtcgggtcagtggcgggatattgctaatagcggcctgaaaccagcgatgacccttagtagtgaggtgattgccgtacagacgctgaaaaacggcgagcgggtgggttacggtgggttgtatcaggccgccggcgaacagcgcatcggcattgtcgcctgcggttatgccgacggctatccgcgcgtcgccccgagcggcacgccggtgctggtcgacggcgtacgcaccaccactgtcgggcgtatttcgatggatatgttggcggtagatctgacaccttgtccgcacgcgggtattggcgcgccggttgagttgtggggcaggagattaagattgacgatgtcgctgcggccagcggcaccgtcggttatgaattaatgtgcgccctggcgccacgggtaccggtagtgacagtgtaactttgtgtgaggcggatcactccgcctcatcttccgcgacccgcacacccaccttcagtacgtggtcgtcctctttttccgcgaccgtccacaccataccggcaaactccacctgatcgccaacgaccggcgcggcgcctaatagctgctgtatcacatcgcccagcgactgctgatgctcgcgaaactcttcaccgccgtcgaggccgtagatctgcgccacgtcggcgaatttagcttccgcatcgaggatgaagtcgccaaagaatcgctgatcgagagaaaccggcggcgactggctaaacattttacccagcgccggcaggtcgcgctcgcggccgataacgcaaagaatatcgccatccatcagccgcgtgctgccggtaggatgtagcagtacgttgtcgcgaaagagtgccgcgatgcgcgtctccggcggcatgtggagatcgcgcaacgctgcgccaacgcaccatttatcatcacccagctggtagacaaactgttcccacggattttccggatggatatccaacccaacgcgagagattggccagccgaccggcggtaccacgactttcgcttttttcgccgcccaggacagtgaggtgccctgaagcagcagcgaaatcaacaccacgaagaaggcgacgttaaagaacagccgcgcgttctcaagcccggccatcatcgggaaaacggcaaggataatcggcaccgcgccgcgcaatccgacccaactgataaacacccgttcgcgcagattaaaaccgcggaacggcagcaggccggcgaataccgacagcggacgcgcgatgaatatcatccacattgacagcagtagcgccggaatcgcgatcggccacaggtcggacggcgtcaccagcagaccaaggacgaggaacatggcgatttgcgccagccacgccaggccgtcaaagttttgcagaatgccgtggcggttgcgaatgggtttattaccgagcaggaagccgcagagatagaccgcgaggataccgctaccgttaagagacgtggtgacggcaaaaatcatgatcccgccgcttagcgccagcagcgggtagagcccggtaggcaggacaatacggttaatcatctgcagcagcaaatagccgccgccaagaccaatagcgatgcccagaccgaactgttgaatgatatgcaccacaaacatccagctcaggccggcttcatgctgctggatcatctcaatcagagtaatggtaaggaacaccgccatcggatcgttactaccggattcaatttcaagggtcgagccgacgcgctcgttaagccctttaccgccgagcagcgagaagaccgctgccgcgtcggtggagccgacaatggcgccgatcagcagcccttctattaaatcgagcttgaacagccatgccgccatcatcccggtaagggcggaggttatcagcacgccgactgtcgccagcgatagcgctggccagagcgccacgcgaaacgaactggcctgggtgcgcatcccgccgtccagcaggatcaccgccagcgcgaggttactcaccatataggcgaagggatagttatcgaaagggatgccgccgataccgtcaacgcctgccagcataccgatggcgaggaagataaccagaatcgggatgccgaggcgcgaggagaaagaactcaataaaatactgcaggttactaaaacagaacccaggataaacagactaatgaccgcagcggcgtccaatgttcacgtactccttgtcagcgtgaaggggtgaaaattacaccattttaacaatccgcgcgttttcaggatactcgcggagaggaatttttattccgccagcaccggatggccacttatcgttaacgttgcgacagaggcgttgttgaccagccgcgcctgtgcgccgagaggcaaagtcacggtgcgctgttcatgaccgaattcgagtccggtcagcagcgggatggtgagttgctgacgtagccacgcgtacacggtgggtagatcgtaaccgtcgtcatagtcgttgggttgcgcgccggtaaagctgccgagcacaattgcccgttggcgggcaaggatcccgctgttgagcaactgtaacagcatacgctccacgcggaacgggtgttcgttgatatcctcaagcaccagaataccgccgtcaatctgcggtagccacggcgtgccgatgagcgacgtgaccatcgccagattgccacccacagggtgccttcggcgcggcaggccgggccatcgctttgccattcgagggtaaactccggttcgcgcagcgcctgccagaagtgatgttcagtaaacgcattcagggtttcagcgccgaaattgcccgctaacatcggcccgctgaagctgatagcgttcgctttagccagcagcccatctggatggcggtgaaatcgctgtggccgcagataagcagcggatcccgctgctggcgcgcggacaatgcctgccagtcgatatgcgatagtagccgggtggcgccatagccgccgcgtaccgccagcacgatgcggttttttccctcaagggccgcaagttggttaatatcggccagacgttcgctgtcgctgccggcgaaacgctgctgtcgacgggggatcgcctgttggttcagtacctgatgaccggcctcctgcagacgggccacgccaagggccgcagcctgttgattgatacagtaaccggaaggggcgaccagataaaactgagacatggcaattccttgcaaagaatgaaagggttatcatgccgcctggaacgtgtattgtcatctccgtgcggcaaacttcagccaataaggatagatgtgtgaaattgagatggtttgtttttttatttgtattgttggccggttgtagctcgaagcacgattacaccaatccgccgtggaacccggaagtcccggtgaagcggtcgatgcagtggatgccgatcagcgaaaaagccggcgccgcgtggggggttgacccgcaactgataacggcaatcatcgcgattgagtccggcggtaatccttcggtggtcagtaaatccggcgcggtaggactgatgcagttgaagccgtcaacctccgggcgtgatgtctatcaacggatggggtggcgtggtcagccttcggtaagcgaactgaagaacccggagcgcaatatctcgatgggggccgcttacctgagtattctggaaaacggcccgctggcggggattaaggatccgcaggtgatgcgctatgcggtcgtggtctcttatgccaacggcgcgggcgcgctgctgcgcaccttctcgtcgaatcgccaggacgccattgacgagattaacgatcttgatgccgatgagttctttgagcacgtggcgaaaaagcatcctgccccacaggcgccgcgctatatctggaaactgcagaaagcgctggacgcgatgtaattcctatccttgcgttgcctccgggacgtgcccggaggcaacgttgtcagaaatcgtagcccacggttgccgtgacgctgcgttcagcccccagtaacagttgccggtgccgtagcagccggaaagatattcacgatcgccgatattattcgcgttaacctggatataggcgcctttcatcgctgtcgaccacgctccgagatcggcgcgcgccatcgcatctatcagggtgactgacggtaaacgttcggtattggcgtcatcggcccactgtttaccgatatagcgcacgcccgcgccaacagtaatgcccgccggcaattgatagcgcgcccagaacgaggccatctgatccggcgtcagctgaggcgtattactatcggtgccgtctttagtgtcctgaaagcgcaggcgattccaggtataggaggcaatagtgctcaattgcggcgtaatctggttatgcgcttccagctctacaccctgtgaatgcactttcccggcgggaatataggtggcggtggcaatgttaggatcgcgggtggcgacatccttttgcatcaagtcgtaaatcgcgatgctatacaaatcgctactgcccggcggctggaatttcaagccagcctctacctgttcggcggtggtgggttttaataacgtgccgtcggcgcctggcagcatcgctggggtaatcgcctggctgtagcttaagtagggcgaaagaccgttatcgagcgcgtacagcagcgaggcgcggccgctgatgtgatcgtcggagcggcggtttgacgtgcctgaggtgtcgctaacctgctgtgaaacgatgcggtcgtagcgcccggaaacatcaagatgccagcggttccacaccatttcatcctgcagataaatcccggtctggtaataacggcgattattgttatcgctgtaggtgatggtatgcccggtttgcggcgtatagccggtgaacggattgagcggcgccgcgccgccggcgccggtccacaaatcgttgcggaagcgatgatactcagcgccgaggattagcgtatgcgccagttcaccggtcgtgaaatcggcgcgcaggcggttatcggttgaccaggcgtccagcgacccgcgggaaccgctgtagccgcgggaaagcatgtcgctgtcatccacccagccaacctgataaacctgatccagcgagacgttggtatgggtatagctgcccgcggagtaggccgaccagacatcgctaaactggtggttgaactcgtagctgtagatctgttcgcggcgttgatagccatcacccggatcgccttcattggtgctgggtgaaagtttacggccgttgtgcgcgtaacgggtgccatccagcggcagagagccgtggtagccgcctgagggatctttttgcaggtaggcgcgcaacagcagcgaagtatcgctatccggttgccacagcaaggaaggcgaaatcgcgtagcgctcttcgcgggtatggtcatattgcgtatcgctgctgcgggtcataccgatgagccgccaggcccactggtcattgatggcgtcggtatagtcaaaggctgcgcctttggtattttgcgtgccgccggtcagacgaaagtgaccctgctggctgaactgcggccgtttggaggtcaaattgaccaccctcccggtacgctctggccataaagggcggaagagggaccgcggatgacgtcgacgcgctcaataaaccatgggtcgatctgcagtacgttatggctgccgccgtcgctcatcaggcgcatgccgtcaaggaacaggttatcgacgtcgccgccgtggtagccgcgcagcgagatggtatcaaagcgcgtcgcgccgccgccaaaacttgaataaaccccggcgtatactgtagcgcctggcttacggtattggcgccctgatcggcgatctgctggcgggtgatcaccgataccgactgggcggtagttatcaacggctggtcggttttcgtggcgccggttgatgttttagcgttatagccttgagtctgcgcgctggcggagtcgtcaggttgcgcggtaacgattagggtatcttctgcctgcgcggcgagagggaaggcggccgcgagagcgtacaccagtgcggagcgtttgaagtaaacagaggagatcatgccataatcctgaatagcgcggtctggcactcctgtgcgccgccgcggaaataaacgaaatgctttttcgttaaaaaataatacgaattattatcgtttgcttttgcatgatcaagcgaaatagtcctcctcagagcaagaagacattttgctggctgtcgagcggatgatggggtgacgtcgatggaaaagcgcggcgaaaatatcgccgcgcgcaggggattattgggcttttttctctggagccgccacggcatcgttcgcggctggctgttggccggtggcgctttctgtctgcgtcggccgggtcgccggcagagcatcgcacggtttttcctgcgggcaaaccagatcgagcatctttaacgtcacgccattggtccagccaaagccgtcctgcaggggatactctccaccgccgccgccggtacccgttgaactcacgtcatatttctctaccagcttctgcttgctgtcataggtgtgctgtacgttgctgaggaagcgccaggtgacctccatggccacttttttctgaccgtagttctgcagaccttccaccgccacccactgcagcggcgcccaaccgtttggcgcgtcccattgctggccgctattgaccgtggtcgtggtgaggccgccgggcttcagcaggcggctttccgccgccgcggcgactttcgcggcgcgttcgctggaggacgctttgacgtacagcgggaatagcgccgcggcggtcagctgattacggactttatggctcttcagatcgtaatcggcataccagccttctttatcgttccacagatatttttccagcgctttctggcgggcgttcgccagcgcatcgtactgcccggctttagcgctgtcgccagcggctttactggcgcgcgcgatggttttctccatgtggaacatcagcgcattgagatcgaccggaatgatgctggtggtgcggattgtcccagttgctgcggattatccatccagcgagagctgaaatcccatccggaagccgcggcggaacgtaggtcgcgatagatttcggtggccgggcggttaggattgtttttggcggtggtgacatcgtccagccaggactccggacgcggcgtatcgttatcatcccagtagcggttgagcagcgcgccatcttccatacgcaccacgcgtttattggctttaccgggcgtcagcgcatcggcgccttccatccagtagcgatactctttttccatctgcggcagccaggtctttagcgcccgatcgccatcgtggctggccagcagctcaaccataaaggagaagaacggcggctgcgaacggctcagatagtagctgcggttgccgtttggaatgtggccccagcggtctatttcagcggcgaagttggccaccatgtcttctactttatcccagtgcccgctttcggcgaggcccagcatggtgaaataactatcccagtaataaacctcgcggaagcgtccaccgggcaccacataaggtttcggcagcggcagcagtgaatcccatttctcgacctcgacggtgctgcgggttaataccggccatagcccatcgatgtgttgacgcagagtttgtcctttcggcggcacatattgatcgttatcacgcggcagggtgaagttgatctcgacgaaatggcgcagatcaaaactggcctgacttttttgcatccgatagtcggcaaggatcattagcgggtcgctgttcggtaccgcatcagcgaaggttttttgatcagggaataatttcgcgctctgcacgtcgttaaacagcgggcctaatagttcatcaggcgattgcggtatcgggcggtgttgtcatctgcctgcgcggcgaatgccgccaggcttaatattgcgcctcccagtgccagttgaataaggtaggtcagggtatccgggcgacgtagaaccgatctcgtcatcgataattctccatttttgcgttttgctgacttcgcgccactgcgaacggccatcagaaaaccttagccgaatatcggccgcttcgcgtgttggagttaacattttggccgaaaacagactatttacctggcgacgtattgtccgggagttttgccggtctggctgcgaaaaaagtagataaaggcgctatcgctggcaaactccagcgactgggcgacatccgtaatgcgttgaccgctggctaatagctctacggctttcatcagccgccactgctggcgccattgctgatatgacatgccggtttcacgctgaaacaggcggctgatggttttttctccggcgccgcattgcgccgccagttgttgaagctgtggcgggtgtccatggccgttgagatgacgcagacgtttatcctgcggcagcgttagcatcatcggctcatgttttgccgcgccgatttccgccacgctgagcgccgccagatgccgggccgggccctgttgccagtctgtatcccacgggctggcgctaatgcgttcgagcaactcgcgcagcagcggggtaacgttgaggatggccggggcggcgggtagctcgggataatgcgtattagcgaaccacaccgaacggtaatcaacgatgcgctgcatttcggcgcggtgcgtgacgcctgcggggatccacgccgcgcgggtcggcggcaacatacacaatagtgcgccatcgtttagcgtcagccggatacaaccctgacgggtaaataacatctgccccatttgatgccgatgcagaccgtcgtcatgatcgccgttaagcgtggattgcacgccaatcaacggcgcattgaacgtatcagggtcaaaggatgtatccgcgctgagccatgccataatgtctgattctcgatgtttaatgtcattatatttataatcgccgtttttgccgctccctacaatggcgcctttgacaagggaggtggatatgttaagtcgttcggcgatggcgctggttaccgcattactcatgtttccgcaaatcgcggagactatctatagcccggcgctgactgatatcagcacacatttttccgttagcgccgccgatgcggcgcagacgctggcggtctattttatcggctttgccgtcggcgtactgttctggggctggttcagcgaccggcgcggccggcggccggcgttattgctcggtctggcggtgtataccgcaggctgcatgctggcgctggcggcgccaaattttagcgtactgctggcggcccgcatcgtggcggctttcggcgcggctatcgggtcggtggtcgggcaaacggtgctgcgagatgcgtttgatggccggaggttggcggcgatcttctcctttgtcggcatggtgctggctatcagcccggcaattggcgtttatcttggcggcgtgctgacggcctggcgcggaatgaacggcgtcttcggcgcactggcgttgctggcggcggcgctgttgctgctgtgcgcggcgatcatgccggaaacccggccgccgcgaacgggggagcaggcgctctggccgttaatgcggcgcatgctggcggatgcgaaaattcgtttagcggtagcgctggtggcggcattgaatatcggtttgtttagctattacagccagggacctttcctttttgcccgactggggctggatgcgcgtatttttggctatagcggcatagcgctggcggcaggggcgttggttggcgcgcagggcaatcgtttgttactgcggcgtggagcagggcagcggcctatttttatctgtgccggtctgctgttattggccgccagcgcaggcgtatgcctgttagcggattcatggttctttttgctaccgatgatcgcagtggcgacagcctacgccatggcgatccccgtagtactgggaacggcgcttagcgactatgctgattgtcgtggtagcgccggagcgctgtttggcctgacctattatttggttatcggcttggggctggcattagtgggttgggggcaatcgctcggcgtcgcgttggcattctgtgcggtgatttgcgcgttaaccggttggcgttatctgcgatacattgatgattagtttctggatttgtgatgattagcacaaatcactatttagcaggtttgtgagtggatgaaaaatcgatattgattttaatcaaggaattacctgctacaaaatagccgaaaaacgtggttaaaatgatgttgtaaatgatgatttattgtttatttttgttttcgtctaaattaatgaaatatatctttacatacaaataaggcgaaaaattgtgacctcatcccgtaataaatcgaaataaatacagttttctcattttatttgattgtttacacctgagttttaatcaagaattaatgtgaaatatctccttttattgcttgaaaattaccctttccttgctcgcgtttagcttaaaaattaaccttttttatccccataaatattttttatcccctcatatttctttgactaaaatcatgcttaatttcatgtttttgtttttatattattgattttatttgctttgttttgtttcgcggatgaggttgaatataggtgaaagtgctttgtgagtggtctcacacaaccagcggatcatcatttgatacactttccgccgtcaacaaagtcattaacgtggataaccaatatgaatactattccgctccctaaaactcagcacctggttgtattccaggaggtgatcagaagtggttcgattggttcggcagcgaaagagttaggattaactcaacctgcagtcagtaaaacgattaatgatattgaagactatttcggcactgagcttattgtccgtaaaaataccggtgttacgttgacggaggccggacaggtgctgttgagctggtcggagtcgattacccgcgaaatgaaaaatatggttaacgaaatgaacagcatgacctgcagcaccgtcgttgacgtctctttcggtttcccgtcgctgatcggcttcacttttatgtcagatatgatccataaattcaaaaagttatttcccaaagcacaggtctcgatgtacgaagcgcagctttcatctttcctgccggcaattcgcgatggccgtctcgatttcgccatcggcacgttgagcgatgaaatgaagctgcacgatctgcatgtcgaaccgctatttgaatcggagttcgtgctggtggccagcaaatcgcgaacgcgtagcggcagtgccacgctggcatcgttacagcacgaacagtgggtattgccgcaaactaatatgggttactacagtgaactcctcgccacgcttcaacgcagcggcatcaacaatgaaaacatcgttaaaacagactctgtcgttactatttataatcttgttctcaatgctgatttcctgacggttattccttgtgatatgaccgcaccttttggctctaatcaatttattaccattcctgtcgaggatgcgttaccggtggcgcattatgctgcggtatggtcgaaaaattatcgcattaaaagcgcggcctcggcgttagttgaattagcaaaagaatattcagctcatagcggctgtcgacgacggcaattaattgccgttgactgattgtctttttatattaattgaaatttaagctgcgatctgtttatcaatcgctgcccattaacgctattttaattccaggttaagaggttctcatgcatattacatacgatcttccggttgctattgaagatatcctcgaagcgaaaaaaagattggcaggtaaaatatataaaacggggatgccgcgctcaaattatttcagtgaacgatgcaaaggcgaaatcttccttaagtttgaaaatatgcagcgcaccggttcttttaaaattcgcggcgcgtttaataaacttagctcgctgaccgacgcagaaaagcgcaaaggcgtggtggcgtgttccgccggtaaccatgcgcagggcgtttcgctctcctgcgctatgctcggcatcgacggtaaagtggtgatgccgaaaggcgcgccaaaatcaaaagtggccgccacctgcgactactcggcggaagtggtgctacatggcgataactttaacgacaccatcgccaaagtcagcgaaattgtcgaaatggaagggcgtatatttattcctccctacgatgacccgaaggtgatagccggccaggggactattggtctggagatcatggaggatttatatgatgtcgataacgttattgtgccgatcggcggcggcggtttaattgccggcatcgcggtggcaattaaatcgattaacccgactattcgtattattggcgtgcagtcggaaaacgttcacggcatggccgcctcgtattacgccggagaaattaccaatcatcgcaataatgccaccctggctgacggttgcgacgtttctcgtccgggaaatattacctatcagatcgttcgtgaattagtggacgatattgtgctggtcagcgaagacgaaattcgcaacagtatggtcgcacttattcagcgcaataaagtgattaccgaaggggccggggcgttagcctgtgccgcattattaagcgggaaattggacagctatattcagaaccgaaaaaccgtcagcattatttccggcggcaatatcgatctgtctcgcgtatcgcaaattactggtttagttgacgcttaatctttttgatgaggaaaggatatgagtactacagatagcattgtatccagccagacaaaagagtcgtcctggcgcaaatcggacaccacctggaccctgggcttattcggcaccgctattggcgccggggtattattcttcccgatccgcgccggtttcggcggcctgatccccatcttactgatgttagtgttggcctacccgatcgccttctattgccaccgggcgctggcgcggctgtgcctttccggctcaaatccttccggcaacatcaccgaaacggtagaagagcactttggtaaaactggcggggtggtgattactttcctttatttcttcgcgatttgcccgctgttgtggatttacggcgtgacaatcaccaatacctttatgaccttctgggaaaaccagctgcagttgccggcgctaaaccgcggttttgtcgcgctgttcctgctgctgctaatggcgtttgtcatctggttcggtaaagacctgatggtgaaagtgatgagctatctggtatggccatttatcgcaagcctggtgctgatttcgctgtcgctgatcccatactggaactctgcggtaatcgatcaggtccatttaagcgagatctcgctgaccgggcacgatggaattctggttaccgtctggctgggtatttcgattatggtgttctcgtttaacttctcgcctattgtctcttcattcgtggtttccaagcgcgaagagtatgagaaagagtttggtcgcgagttcaccgagcgcaaatgttcacagattatctctcgcgccagcatgctgatggtggccgtggtgatgttcttcgccttcagttgcctgtttacgctgtcgccgcagaatatggcggatgccaaagcgcagaatatcccggtgctctcttacctggcgaaccacttcgcctcgctgtccggcaccaaatccacctttgctacggtgcttgaatatggcgcgtcaatcattgcgctggtggcgattttcaaatccttcttcggccactatctcggcacgctggaaggcctgaacggtctggtgctgaagtttggctacaaaggcgataaaacccgagtttccagcggcaagctcaacaccatcagcatgatttttattatgggctcaacgtggattgtcgcctacgccaacccgaacattctcgacctgattgaagcgatgggcgcgccgattattgcctcactgctgtgcctgctgccgatgtacgccatccgtaaagcgccatcgttggcgaaatatcgcggccgcctggataacgtcttcgtcacggtaatcggtctgctgaccattctgaacatcgtttacaaactgttttaattaagctcaggacgagcggagtgatgacatgaatgaatatccggtagtactggtcattaactgcggctcgtcttcaattaaattttcagtacttgatgccgccagctgtgaagtattaatggctggtattgcagatggcgttaattctgaaaatgcgttcttgtcaataaatgggggagagccggctaagctggctcaccgcagctatgagggcgcattgaaggcgatagcatttgaattagaaaaacgagatttaatggatagcgtggcgttaattggccaccgtatcgcgcacggcggcaacatatttactgaatcggtgatcattaccgatgacgttatcgataatattcgccaggtttcgccgctggcgccgctgcataattacgcgaatcttagcggtattgaatcagcgcaacagttattcccgggcgtacaacaggtggcggtgtttgataccagctttcatcagacgctggcgccagaggcatttctttacggcctgccgtgggactattaccagcgattgggcgtgcgtcgctacggtttccatggcacctcgcaccgttatgtggcccagcgcgcgctggcgctgcttgatttacccgaacaggatagtgggctggtcattgctcatcttggcaacggcgcgtcgatttgcgcggtacgcaacggccacagcgtggacacctcgatgggcatgacgccgttggaaggtttgatgatgggcacccgcagcggggatgtcgattttggcgcgatggcgtggattgccggtgaaactaaccagacgctcagcgatctggaacgcgtggtgaataaggagtccggattgttggggatatccggattgtcatccgacctgcgggtgctggaaaaagcctggcatgaggggcatgaacgcgcgcagttggcgattaaaacctttgtgcatcgtattgcccgccacattgccggccatgccgcctcgctacgccgccttgacgcgattatttttaccggcggcatcggcgaaaattcggtattaatccgccaactggtgattgagcatttagcggtattcggcgtcagcctgaatgatgcgttaaataaacaacccaactccgccggtgaacgcattatctcttcccgcgaggcacgagtgatatctgcggtaatacccaccaatgaagagaagatgattgcgcttgatgctattcatttaggcaaaattaacgcatccctggaatttgcttaattacgttattgtcctgtagagagattatttttcatgaaggtaaatatcgataccagcgatatgctgtacgccgaagcatggcacggatttagcggtacggactggaaagaagaaattaatgtccgtgattttattcagcacaactatacgccatataccggggatgaatcgttcctcgcacaggcgacgccggcgacaaccgcgctgtgggaaaaagtgatggccggcattcgcgtagagaacgccacccacgcgccggttgattttgataccaatatcgccaccaccattaccgctcacgatgctggctatatcgaccaggcgctggagaaaattgtcggtctgcaaacggataaaccgctcaagcgtgcgctgcatccgtttggcggcattaacatgattaaaagctcgtttgatgcttatggccgggaaatggatagccagtttgaatatctgtttagcgagctgcgtaaaacccacaatcagggggtttttgacgcctattcgccggatatgctgcgctgccgtaaatccggcgtgctgactggtctgccggacggctatggccgcgggcgtattattggcgattaccgccgcgtggcgctatacggcattcgctacctggtgcgtgaacgcgagctgcagtttgccgatctgcaggcaacgcttgagcgcgggcaggatctggaagccactattcgtctgcgtgaagagctggcggagcaccgccgcgcgctgctgcaaatgcaggagatggcggcgaaatatggctgcgacatctcccgcccggcgcgcaacgcccaggaagcggtacagtggttgtacttcgcctatctggcggcggtgaaatcgcaaaatggtggcgcgatgtcgctggggcgtaccgcctctttcctcgatatctatatcgagcgcgacttccacgccgggatcctcaatgaacaacaggcccaggagctgatcgaccacttcattatgaagatccgtatggtgcgtttcctgcgtacgccggaattcgatacgctgttctccggcgatcccatctgggcaaccgaggtgattggcgggatggggctggatggccgcacgctggtgactaaaaactctttccgctatctgcatacgctgcacaccatgggcccggcgccggaacccaaccttaccgtattgtggtcggaagcgctgcccattgcctttaagaaatatgccgcccaggtttcgatcgtcacttcttcgttgcagtatgaaaacgatgacctgatgcgcgccgatttcaacagtgatgattacgccatcgcctgctgcgtcagcccgatggtcatcggcaaacagatgcagttcttcggcgctcgcgccaacctcgctaaaacgctgctgtacgcaatcaatggcggggtggatgagaaactcaaaatccaggttgggccgaaaaccgcgccgctgatggacgaagtgctggattacgacaaagtgatggccagcctcgatcattttatggattggctggcggtgcagtacatcagcgcgctgaacatcattcattacatgcatgataaatacagttatgaagcctcgctgatggcgctgcacgaccgcgatgtataccgcaccatggcctgcgggattgccggtctgtcggtggcggcggattcgctttcggctattaagcacgcgaaggtgaaaccaatccgcgacgacagcggcctggcgatcgattttgagattgaaggcgattatccgcagtacggcaataacgatcagcgcgtcgatagtatcgcctgcgatctggttgaacgttttatgaagaaaattaaggtgttgccgacctatcgtaacgcggtgccgacgcagtcgattctgacgattacttcaaacgtggtgtacggccagaaaaccggcaataccccggatggtcgccgtgccggtacgccgtttgcgccgggagcaaacccgatgcatggccgcgatcgcaaaggggcggtcgcttcgttgacttccgtggctaaattgccgttcacctacgcgaaggacgggatctcttataccttctcgatcgtcccggcggcgttaggcaaagaggcgagcgtccggcaaaccaacctcgtcggtctacttgatggctacttccaccacgaagagcggatcgagggcggtcagcatctgaacgtcaacgtgatgaaccgcgagatgctgctggatgccattgctcatccggaaaattatccgaatctgaccatccgcgtctctggctatgcggtgcgctttaatgcgctgacccacgaacagcagcaggatgtcatttcgcgaaccttcacccaggcgctgtaacgcaacggggcgacgatcatggtcgccccatttttttcatggctatgaaacctggtcttcactacacggtaaaccgaggtgtgaatatgattagcgctttcgatattttcaaaattggtattggcccttcgagctcccatacggtggggccgatgaatgcaggaaaaagttttatcaccgagctggcgacctgtgacaacctgacgcagactacgcgcattgtcgtcgatctgtacggttcgctatcgctcactggcaaagggcatgcgaccgatgtcgctatcatcatggggctggccggaaatagtccgcaggatgttgatattgacgccatcccggcatttattcagcagatgaccgagagcggccgtctgccggtggctaaggggagtcggcaggtagacttcccgctgccggagagcatcgtatttcatgatagcgcgctggcacgccatgagaacggtatgcgcatcagcgcctgggatcatcagcagccgctactcagcaaaacctattactcaattggcggcgggtttatcgttgaggaggcgcgttttggccagactcacgatgtcgcaacaccggtcccctttgatttccgctccgcccatcaactgcttcagctgtgcgagcacaatggcctttccatctctggcctgatgatgcaaaacgagctggcgttgcgcgataagggacaaatcgatgccggtttcgccgccatttacgcggtgatgcataacggtattgagcggggaatgaataccgagggcgtactgccggggccgctcaacgtaccgcgccgggcggctgcgctgcgccgacagttggtggccagcgacagcctgtcccgcgacccgatgaacgttatcgactggatcaatatgttcgcgctggcggtgagcgaagagaacgccgccggcggccgggtcgtcactgcgccgaccaatggcgcatgcgggattattccggcggttctggcctattacgataagtttcgccgtccggtcaatgccaactcgatagcccgttatctgctggctgcggcggctatcggttcactgtacaagatgaatgcctctatatctggcgcagaagttggctgtcagggcgaaattggcgtggcctgctctatggcggcggctgggctgacagaactccttggcggtagtccggcgcaggtatgtaatgccgcggagatcgcaatggaacataacctcggtctgacctgcgatccggtggccggacaggtgcaaatcccctgcatcgaacgcaatgccatcaatgcggtgaaggcggtaaacgccgcgaggatggcgctccgtcgtaccagcgagccgcgggtctgtctcgacaaggttattgagacgatgtatgaaaccggcaaagatatgaacgataaatatcgcgaaacctcacgcggcgggctggcgataaaagtgatttgcgactgacgaatcagaaaggactgggctggcgcgccgctatcgcttcaccgctgaccggatggtgaaaatgcagttcactggcgtggagcatcaggcgtgaggcctggtgcgccgccagccctccatagagatcgcagccgagaatcggatagccgagatgctggcagtggatgcgtagctgatgggtgcgtccggtttccggctgcagccgtacgcgagttaccgccagcgaaccacttgctatcggcaaccattcccgtgatagcacctgatagcgcgagcacgccggtttaccgttatgcgcgctaattgccatgcgcggaaacagcgccggatctttggcaatcggcgcatctataaccccttcatcttccgcaggatgcccgcacaacagggcgtgatagaccttgcttaccgcccgctggctgaactgctggcacagcgcggcgttgatcgttttgttacgcgcgaccaccatcagcccggacgtcccgaaatcgagtcgatgcaccagcgtgcaccccggaaaatcccgcaccagtcggtgatggactgaatccaggttctgcgggttcttgcccgacaggctgagcagaccgctgggtttgtcgatcaacaacaaatgtgcgtcctcgtagaggatcttaatctgcgcggaacaaggtggggcgataaaggtatcaattacggtgggcatggacaggtgctgtaatgggtgagggggatgatagcgaatctctgtccggaaggcgacctgggagtgtacgctccggaactgaagactttttttaaagcattgcgataacaaattatgcaaccccctttgcagagacgagctggctgtggtacataattgttatgttataacataagaaaatcgataagtatgcttaagagtgatactgaaatacttagcatcaagggactgagtctgactgtcaaaaaggggacggtaatacttgacggtattcatttctcgctccgagccggggaaaagttggcggttattggacctaacggcagcggtaagtcgagcctattaagagccattattggcgaagtcaatccggataaaggagcgctgtactggcagggggggccactacggcaactgtcgccacaagcgcgcgcgcggaatattgccttcctgtcgcaaaacgatatccccgatttgcgcctgacggtggaagaatatgttcaattgggccgtttaccgtatcgcgaatcaccgtcctcggcgcagggacaacgcatcgtggatagcgttattagtgatacgggtctgcagcttttacgccatcgcccgctgggcaacctctcaggtggtcagcgtcagcgcgccgcgcttgctcgcgcactggcgcaatcccccgaattactattgctggatgaacccaccaatcacctcgatccgctggcgagaagtgagttgcttaccctggtaaagcgcacagaggttgcagtgattgcggtgttacacgatcttgccgcggctgaagcctttgccgaccgaatgctggttatccaccacggcaagcaggtgatttgcgacgtacccgaggctgcgctgcaccccagcgtaagctatccggtttttggcatgaccagttttcgcgtggcgcatcccgtgagcggtaaagcgctgcgcatttttgaagttcctcatcgcgcttaatggcctcgactaaatatgaacagacttttaactatcttatggctgctgttaagtagcccgttagcgttagctaatccatttcccgttaccgtggacagctgcggtaaacccatcacctttaatcaacccccgcagcgtgcggtaattaacgatcttaatatggcggaaatggccttcgcgctcgatctccaggatcggattgtggggctaaccggcattaccggctggtataaactaacaccacagttcaaagcagcgatgggggccatccccgagctggcgcctaaatacccgtcgctggaaacgctgctggcggtccggccggactttttcttcgccggttggaactacggcatgaaaattggcggcgatgtgacgccgcagacgctggcgccatatggaattaacacgctggtattgagtgaaagttgcgtacaggccggtgggcaggcaaagaaagctgacatgagtttgctttacaacgatgaactcaagttgggtaagatttttggcaagcaacaacaggccgaggcgttggtggaagggtggaaacgtcggctggcgaacctgcctgtcaggccagaaaatacgctgcctcagcgggtctttgtctatgactccggcgaggataaaccctttaccagcggcaagtacgggatgccgacggcaattatcgaggcggccgggggacgcaatgtgatggacactctggacgcgaactggaccacgacgagctgggaggcggtggcggccagcgaaccacaggtgattattctgctcgattaccaaaccggaacgggaaccgtggcgctgcagcgcgtactcgaatctcatcccctgatgaaacagacgcccgccgtccggcagcagcgttatctaaagttacagtatgctgaattaactccgggaccggcgaatattgcggcagttgagaagctggcgcatctcttatatgccacggacgtgaaatgaagccatcagtgcaacgctttctgctatggacggcgctggcatccgtcgttttatgcggcatgatgatagcgagtctgcagtggggaagtgtggaactctcgtggcgacaggtggtatccgcgttgggcctggcatccgctcccattcccgagattttgaaaactatcgtcattgacttacgcctaccccgagtcctgctggcggcgctaaccggtgcaggactggcgatcgtcggcttgctgttacagaccacgacacgcaacgaactggccgatccgtttttgtttggcctctcttcaggcgcttccgccggcgcggtgctggtgatcacccgcttcggcgatgtactgggggcgttcacgctgccgggctcggctttcgtcggcgggatattatccgcgctggcggtgatgatattgtttcgcgtcaaccagctaaggcgagcggaacagttaatcatctgtggcctggcggtgtcgtttcttttcagcgcgctgaccagctatctggtcttttccggagaccagcgggcggccggttcgctgctattctggtcattgggcggtctgggactggcgcgatgggataatcttattatcccattagcaagcctggcgttgttgagcggttttaccctccgccgctggcgggcgctggatgccatgctggcaggggagcagacggcctgctcgctgggcgtcgaggttgagcgactgagaagcgaaacctttctctgctgcgcgttggctaccgctttgctggtctctttaaccggggttattggttttgtcggcctgatggtgccttatctggctcgtcgggccgttggcgtcaggcaccgaatggccgtgccgatgtgcggtttgctgggcgcgatattgcttaccggcggcgatatgcttagccgaagcctgatagcgaaccaggaattgccaatcggtatcattacggccgggttaggtggggcgtttattatctgcttactgatgcgctcagagcgctaaaacgaacctgtaaatagatgttaacccattattgcgcgtaaataatgggttttatttttttagtgaatgtttattttctggcaataaaatcattttctacctttaagagccggttattcagggggaagattctgttaaggtaattatctgctcgtaaatgattcatcaaaaaaatagcctggtgataattccactcaggttaagactgttgcggctttacgataagttatgatttatatcaatgtaataagcataatcagcttatcacgcgttcattagttaattattgagcgaattttctgtctgagtgaaatgttgccatgtattatatggcccatcattgctttttaagctttttttcttttatttgcatggcgaatattcttgatgtcaacctggatatggttcattaatctcatgggatagctgtcattcgcaattcatactgacgcgaattaagtttaaagagaatattcaatgtcgggctgtaattggttttggtaaaaataaatcctgtcggttattaattcaagaaaaataaataccaggaataataattcaaattgtgcgcatttcggagtgccgcccataaatctgttggtacggtgaaaattaaaagccgggtttaagtgcgccttattgaagatgcaagtgtaacgcacaggaggtgcgatgaagacattacgaccattgtgggggcggggtcagatgatctctccccaacattttcaacagcaggtaaatcaaacggtctggcaaagtgaatgtattgcccgtctgggggtactgaatccatggggcgtcatccgcgttgagtttgacgccgctcttctaaaacaggggaaactgaaggccagccacctctacgtgcgctttcctgacggaacgcttatcgacagcgataatgctgatgcgctgccgccggtgatggtgttgccgcaagcggaaagtcacgaactcacggtgatgctggcgttacctcatgagcatgaaaacggcggcaactgcctgcaggcggagcaacgcgcagagcgtccggtacgttggcgtcaggcctggcgagaggtgcgcaaccgttatggcgaagacagtcgacagattgccgtgatgcttgcgcaactgacgctgcgcactgcggatgacgacaacggtgattatcaaaccatcgccgtcgccagattacgtcgcgacagtcaggattgctggtcgttggatgagaactttatcccgccgctgctgaaagtgttggccagccgctggctgcacgaacagacggaacagctgacgaatcaactgggcacgcgccttaaacgcctgatggctatgcgccgggagagcaacgccaggatggcggattttgcggtagcggatgtatcgctgttttggctgctgaacgcgcttaacagcgcggagccggtgttgaaccatttcctgcgccatccgcaggtacatccggaacggctgtatgaagcgctggccagcctggcgggcagcttgttgaccttctcccttgaccataccacggcggatattccgctctatcgccatcaggcgttgacggaagtctttccaccactgttcaaattactcggcgtactgctcgaagccagcctgccatcccgggttgtggcgattgaaatgacgcacgatgatcggcgtaagcgctggcatgcccgtctgcacgacccaaggctgcgtgaagaggccgatttctatctctcggtgcgttccgcgctacctgcagcgcaactgctggagcagtttccgcaacagtgtaaagccggtagccccgatgaggttgaccgggtggtcaacggttcgcagccaggcattccgctgaaagccatgagtcatgttcctgccgccattccgctgcgcctggagaatcagtatttcacccttgatatgactcatccggcggcgcaggcgatgctggcggaagggagttgcgtcttttatgtgcccggtctgctgggcgaccctgaactcgaactgtacgcggtgctgcgctcatgacccaggatatcaatattgatgctctgctggcggatagctggctaacggtgacggaactgcgccttggcgccaaactggccgagggggaggggaaacacctctggcagcgttgtgtagataatattgaagatgtgatggcgcaactggtggccgctgatgtcagcgaggcgacccgtcagcatatcctctatgcgtggtgtgcgctgctggatgaaaccgcgaaaggtcgcaaagaggaagatgacgcctgtatcgcctggtacgatcggccgcttgaggtcaaatattttggcggcatggaagccggagatgcgctctatgagcgcatacgccaggtgctgcgcgagccggcgccggataacgccgttctgacttgtttccatcgagtgctggcgctggggtttaaggggcgctatggcctcaatgatccggcgcgcgtagcgctcgtcagcgcgctcggcgagcgggtaccgccgtttgcgggcgatcctcagcagccgatactggcgcatctatccggccgccaaggtctggcagactggttgcgccgttggccggtcagtattggagtgtcgctggtgctggtgtccgcgttatggttgggattgaactactggctggatggcctggtcgcggctttgcgactgggaggcggacaatgagctcgcgctatcagcgcctgctatggctgtggggcgggttgctggcggtgttgatgagcctgctgtttctgccgttaaccaccggcggccgggtgctggctgttggggtgacggcggcgggcgtagcggccgggctggtctacgtctggcgccaacaacgtgagcgagctgcggatgctgactggctggttgagctaccgtcggcaccgtatcgactgccgattgtactggtctgtggcgacacggcggactggccgggggaaggggcggtttaccgtacggcgcagggatgctggctgagagtcaccaccgccgcgttgcagcagacggcgcgttatgtgcgcaatgagcgcccggcgctcattgcgcaactggcggtgatgttctgcatgcagccgcaacaacatgatgatgacgcggcgctggcggcgcggctacgcgagttgcgctggcagcttgcccaggtgcggggcgacacccgtcgggcgataccgctactgctgaacagcaccctgtccggcgcatcgctggaaccgttatggcagacagcacgtgccggagagatgatgcaggtgtggccgtctgacggcgggccgtgcagctgcgcagcctggcttgcgcaagagagcgggactagccgcctggcggcgcaggtaaggataaatgcgcttgcccgctttacgcagcagatggcgttgagcgtactgacgggggcaaccgacgatgttcccccgatcgctccggcggtcgtactgtatcatttcacgccagccggggcgcctgccgtggcggataatctatggcagcgttggctgtctgagcatacatccctcaattcactaccgggctggttgcccgaaatgacttcagatgcgcggaaactgccggatttcattttgccgatactgccgcagggcggcggcatcgcgccgaaaaaccgtgctctgcggcgggcattccgtctgttcttcctcgcggccctgattgcgctttgctgcagtgcatggaacaaccagcaactcctccagcggatcggctttgatgtgcagcgctatgaacggactgcgatgggcgactatgcagcaaaagcccgcgccgtaaagattttgcgtcaggatgcggcgcaactggacgccttcgcgcgtgacggcgcgccgctggccctgagccttgggctctatcgcggcgagcgtctgcgtcagccggtactgtcagcgattcgctcctacgtcccccgcctccaccgccgaaagcggtagaaaaaatcgtaccgaaaattgtccgtctcgacagcatgtcgctattcgacaccggcaagtggacgcttaaaccggggtccaccaagctgctggtgaactcgctggtggggataaaagccaggcccggttggctaatcgtcatcgccgggcataccgacagcgtaggcgatgataaatccaaccaggcactctccctgaagcgtgccgaatcggtgcgtaactggatgcgcgataccggcgatgtgccggaaagctgttttgcggtgcagggttatggcgaaagccgtcccgtcgccagcaacgatgcgcagcaaggccgggcgctgaaccgccgggtcgaaattagcctggtgccgcaggccgacgcctgccaggtttcgacgaactccgcctcatccccggcggatggcgttttctaaaccgaccatctcatgactcttcgtacggacaggttttcctgtccgtcgtttttgttgccgggtaccggggtcaacacaatctgcccaaccttgtgcgcttttgggctccttaccaacaggaaacagcgacgggcggtagcgtggccgaaggcgacggaagggagataaagagaatggcgtttgatacaggaaaataaaccatgagtgacataaagcctctgttgttcaaccacagccatcatctgttacaggtgcatggttgtcactcgttgctggacgttctgtgctttgaaggcgaggaaaagttaagcgagcctttccgctataccattgaatttaccagcagcgataaaactatcaccccgcagcagatgttgctgcaaaacgcttcgctgaccttgcaggcgccggttgaccagggatttggcattacgatccagcaaccggtgcgcgttcttcagggagtgatcacttcttttgaacggctttccaccgcaaaagaggaaacgcgctacgccttgacgttacagccgcgtctggcgctactgtcgaagagccatcagaatcggatttatcaggatatgtcggcgccgcagattgtggagcacattctcagaacccgtcaccagatgcgcggggaagattttgtctttcaactggcgcatgaatatccgcgccgtgaacaggtgatgcagtatggcgaggacgatctgacctttatctcccgcctgttaggcgaggtggggatctggtttcgctttaccgccgatacccggctgaatattgatgtggcggagttctacgacgaccagcaacactacgaaacgggactgttgttgccttcggtcgctccctccgggcagcatgacggcgggagcgaatcggtgtgggatttacagagccgacaccacgtggttgagcgttcggtctttactcgtgactataactaccgtaacgcgccagaggatatgaatctcaacgtcaatgtcagccgtggcgatagtaccacctacggtgaagcctatcactgggcggacaactacctgacgccgggtaatcgcttccagcatactccggacccggagagcggggccttttatgcccgtattcgccatgagcgctacctgaatcagcagacgcggctgaacggggaaaccaactgcgcggcgctggctcccggccagcagctaaaagtgagcggcggcgaagaggtgacggacgtctggcgccagggggtggcgatcgctgcgattcactgtcgcgcccgtcgcgaccgcagtttcgaagtgacgtttcaggccattcccagtgtagaaacctactgctttcgcccggcaatcatcagcaagcccaggatggccgggacgctgccggcgcgcgtcaccagcaccaaaatcaacgatctctacggccatatcgatcgcgacggacgttatcgggtgaacttattgttcgatcgcgatcgctggcagccggggaggaaagcctgtgggtgcgccaggcgcgcccttacgccggtgaaacctttggcctgcatctgccgttgttagcgggcaccgaagtggcgatcgcttttgagcaggggatcccgacaggccctatatcgccggcgcgctgcacgactccacgcaccaggaccatgtgacgctctataactacaagcgtaacgtgctgcgcacgccggcgaacaacaagattcgcctcgatgacacacggggcaaagagcacgttaaggtcagcaccgaatatggcggcaagagccaactgaacctcggtcatctggtggatcatcagaacacgccgcgcggtgagggatttgagttacgcaccgacagctacggcgcgatccgcggcggtaagggaatatttattaccgccgatgaacagctgaaagcgatgggcgcgaccgtggaaatggatcccgccagtcaattgctcagcagtgccgttgttcagctcaacgactggcaggagatagcccgtacccactacaacacccgccggatgtcagcacgttaaagcagttcgtcggcaaagccgtcaacctggcgagccccgtcctgctgatgagcgcgccgaaaggcatcggcatcgtgacggcggaaacgacgctgctacagagtggtaaagggttgtacctgcaaagcgccagcgatattgcgctggccggcggcaatcggctgtcggtgaataccaaaaacgcaatctcgctgctttcccaccgcgaagggatgcgtatggtatcggtgaaaggaccgctggagatagagtcgcacggcgacacactggcgctcacttcactgaaggatattaccgttcagtcaacgcagggacatctgcagcttaccgccaaaaatggcatcaccctgggctgtggcggcggctacattcgcctgacgccgcagggagaaatccatcttcacagcccgagtctgctcagttttaaaggcacgcataagatgcaggggccggccggcgagacgtttccgcttcccgatcttcccacatcgatatgtaaagactgcctgattcgtgcgcaagaactggctcaggcttttgtgccacgtgccgcctgacaatcgctcattgatataacttacccggaggaacggaccttgaaacccattattcggcagggtgataccttgcgtgagcatggcggtacggtgatcggcggccattatctctgttttggtaaaggcatcgcctgcaaaggcgaccaggtgagctgcaatgaacatggcctgacggtcatagccgaaggaagctcgctgtatgaagtggatggttctccggtggctcttgacgggcatcgttgcgcctgcggctgtacgctggtgagttcacgccctgattgcgaagtcgcgctatgagacagctaaccgactatctgccttacagaaccgccacgccgccccacaacggacggtggttgtccgtcggcgcggggatgacgcttatcagcggaggaggcgcggcgttaatgcctgccgaagcgcgtggcggggcgttaataaccgtcgcaatcgttagcgccatgcttttggtcctcatcatctggatgctgcgtctgctttattaccgcctgtcggttcactacacccagtactaccagcggttgatcgatttcgatcatcaaacgtggtgggcccggcatcaatatagcgttgggctggtggaagcggtgctgctggggccggtggggtgtgaacccgagcgctggcagacgctgctgaggcgagaacatcagccgccaaaagagaaactggagtccggtgcgcggacgctgcggctgatccactcggacatcatggatatcgacctgcgtgaacagcagctagcccgaatgctggtgcaacaatggctggcgcaacatggcgaacatcaacttccctacctgagcggctgttactggcagggcagcgaaccggcgtggagagaattttgcgccgagctgcgcaagcgctgtcccaccgctcagttgccgcatatggcggaaccctggcagggcgaggccagcttatcggagattaccgcgcgaatgaatgcggccggcgacgaatgtttcattctggtggcggggtgccagtcggtggcggcgacggcggattcggctagaccggcaggggaatccgccgtgctctggttactgacccgggagggggaggcgcggctaacccgcggcgaggtttatgaaggcgccgcggtggaaaatatccagcaggtctgtcagcgggcaatgcagcaaagcggggccgaacgcccgcccgatccttgtatcgcattcacacaactgcaaatcccggaactggcgcaaagcggctggaacagcaaccaactgctgcaggatgaaaactggggtgagacgggcagatggagcagctcatcacgattacgctggcggcgatatttgcccgccgctttcatcagtcttgcggctggatcgcccgcgatccgcgtcaccctctctcacttggcatcgtcaccgcagcagtcccggtaccgtaacctcaagacaagagggagtgaacatgtcgttaatgaatcaggaatggattagcacgctggaacaatttgcgcgaaagctcgcgctgcgcgacgtctatctcattgccgatcaaggcgttttagacaacccgttattggatggcttaaatagactttcccctccagtgcagtggttctcactctatgaggggcaaccggaagagccgctgctggagatggcgcctttattgatgcggcttgagccagcttgctggcagcatcgtcaatggatcgccgatctgatcgccgcattttcctgcaagccgggtctgctgatcttcctctcaccactgagtttttcaacgctcgccgcccacctgcgcaatctggccgacggcgcatgggaagaacgttctggcctggtgcgttattacgatacccgcatgttcccgttgctgatgcagcatgtgctcactgaagagcaaaaagcatggtttttagaaccggtttatctctggagctaccgcgatagagacgacaagatctgctggctggaaggcgagtgctcgcctgttcaggcaacgatcccggaggcgatcaagattaatttcagcgatgagcaaatgatgaaactggatgtcgctatcgatgcccagcaatttacggtttctgaaaaattcagcaccttttttaccacccaggaggagaaatttaacaccctttggcagctcggctggcaggcgcatcagcagaattttgtcggcgatttagcttcctggtttgaaagccactttgaggaatgaaacatcctccctgttgatcatcaataggtgatgatcagttctgtaaggacacatcaatgataaagcatatccgtattttgcccggcgggctggcggcgctggtcgccgttattctctacctgctgacggcctgccgtgaccacagtcgcgacggcatgagcggcgctgacatcacccttttaaaccatggtccggacgccatcgtttcggtgcaggtgaacggctacgggggaccaagggccaattcctacggcggcggcttctgctgtgtgatggtgccagatgtctggcacccggggctgacggcaaaaattacctggacttctgaccctaactcctggatgaggctaagcgatatgcctgacaactattcacaatactatcagcaccatgggccgattaccgtgccgattgaacgctgggagaagggtcaggcctgcgattttcatgtgcatattttcctctgcgataaggtgcggatagtgcgttcctgcgtgctcccgggtgggccggttcagccaggtcaacctgaatatccagtccctcagtctccaccggactggaaggaaagagctcagaaaatacttatcaaacatatcagggaggaagttgtatgtctgacaccgcagactccacgctgaatgccctgaaggcgcttattgcggccttccagaccggcgccactccggtcacggttaaagcctccaccgcagaagtggccagcctaccgccaaagtttcccgggccggatgacaaaaagtccgcggataactccacgcagcagaaaaccgaatacaacgagcgcgggcgcctgcctgcgagcagaacgcagaccgaaggcaattacgccaggcagtacctggagggatatgtcggggagtccgatcataaatcggacaaaaaaacggagccgggctgcccggccagcctgcatatcagtctgttctttgacggtacctgctgtaatgaagaaggggctgatgaggtatacggttcgcgtaactcgtcgctgactaatatcgcccgattttatcattggggaaaccggtattaatgtctgtagcggcccgttttatttgaccgctacaaatatcattatcagttatatatggaggttcatatattagaataaatacaagcatttaattatgtcatttattaacaagtcatcactttatatttgtaaggacacatcaatgataaaacatatccgtattttgcctggtgggctggcggtgctggccgccgttttgctctgcctgctgacggcctgtcgcgatcacagtcgcgacggcatgagcggcgctgacatcacccttttaaaccatggtccggacgccatcgtttcggtgcaggtgaacggctacgggggaccaagggccaattcctacggcggcggcggcggcttctgctgcgtgatggtgccagatgtctggcggccgggcctgacggcaaaaatcacctggacctccgatcctaactcctggatgaaatcgagtgagatgcccgatgattatgaaactctctatcagcgccatgggccgatcatcgtccctatcgaacgctgggaggaggatcaggcttgcggttttcatgtgcatattttcccctgcgataaggtgcggatagtccgttcctgcattccaccgggacaaccggggtatccggttccccagtcgccgccagactggaaggaaagagccaaaaatatactttataagcatgttaaggagaacatcgtatgtccgacaccgcagactccacgctgaatgccctgaaggcgcttattgcggcttttcagaccggtgctaccccggtcacggttaaaacctccaccgcggaagcggccagcttaccgccgaagtttcccgggtcggatgataaaaagggagaaaagcctgccgataactctacacagcagaaaaccgaatacaacgagcgcggccgtctgccggcgagcagaacgcagaccgaaggaaactatgcctcttagcatacacaattcgccgctgactaatattgcccggctctaacctctggaaaaccggtattaatgtctgtagcggccaattttatttgaccgctacaaatatcattatcacaaatattcgggaggtatatatatcagcaaaaatataattctgtcattacgccatctcttaataacaacgcatttaatttcttttgtaaggacacatcaatgataaagcatattcgtattttgcccggcgggctggcggcgctggccgccgttttgctctgcctgctgacggcctgtcgcgatcacagtcgcgacggcatgagcgctgctgatatagccgttttaaaccacggcccggacgccatcgtttcggtacaggtgaatggctacggcgggccaggcgccaattcctacggcggcggcggcttctgctgtgtgatggtgccggatgtctggcggccgggactgacggcaaaaatcacctggacctccgatcctaacgcatggatagacccgaaacatatccctggcgatcatgcgagtcactaccagcaccatggaccgatcaccgtgccgattgaacgctgggagaaagggcaggcttgtggttttgatatccatattttcccttgcgataaggtgcggatagtgcgttcctgctacggtcgagcggcccctgaatatccgatacagcctgaggctgacggactaaaaaaagcgcaaaatgtgcttataaatcatattaaggaggagatcgtatgtccgacaccgcagactccacgctgaatgccctgaaggcgcttattgccgccttccagaccggcgccactccggttacggttaaaacctccaccgcagaagcggccagcttaccaccgaagtttcccgggccggatgatgaaaaggagaaaacgcccgcggataactccacgcagcagaaaaccgaatacaacaagcgctgccgtctgccggcgagcagaacgcagaccgaaggcaactacgccaggcagtacctggaggggtatgttaaagagtcagaacatccctcgggcaaaaaaacggaaccgggctgcccggccagcctgcatatcagcctgttcttcgacggtacctgctgtaatgaaaagggggccgatgaagtctatggctctcgtaatccgccgctgaccaatattggccggctctatcatgcagcgaactggaccgatctggatttctcagcagaaaaagacggttacttttgttgctactttcccggctgtggagcgagctttccggagattggcgagaacgaatactcgctggacggcgagctgtttgctaatggcggtgaggatcgtatcaaccaggcgctgcttaaaacctacagcagcatctgctatgcggttaataaaaaggcaattgaggacagcgaactggatacctttcggccacagatggctaccgtctggcccttctcgcggctgacccagaagttcaaccgtaaaagcgcgcttgacaaattctgcgacgaccatctgggtaccgtggtcaaccagtggccgcggcagccaacgcggatgcatatccagcgctcgcagcggcgcatcgccaaaatcaagctgtttgtctacggctactgccgggggccgccaccgcccgcgccttcgcccgcgggctggagtcgctgctcgatgacgctaaaatgccgcttgatgcgacaaatatgctgccggctgggacggtggtgcccggcggtccgaccctgctgggcatccccatcagtatcgagtttatggggctgctggattcggtctctgcggttggcgtgccgcatatcctgccgtcggccaccgggcatctgggctgggcggccaacagcctgcggctgccggccaccaaaggcttcttaaaaagctgctaccactttgtcgccggccacgagcagcacggcgacctgccgctggactccattcgcggtccggacggtaaatacccggccggggcgatggaggtggtctatcccggaatgcatgccgatgtcggcggcgactgtaagcccacggaactcggcaaagtgcagaccgacgcccgcagcctgctgtcaaagattgtgctgcacgatatgtatgccgccgccttcgatgccggggcgccgctgagcgtgcctcctgaggtattgcccggcggcgccaaagataaaacctatcgaatgatgtctgtttatgtattggagcaattcaaaatctccgaacaggcgatcgccctgtttaacgcctgcagcaggcggcggcgcccgcggaaagcaaagggccgcgtgaagtgccgtttatcgataaagatcggctggaccgcgcggcgtggggctatgactttgcccataccggtatcgtggcgctgcgggatattattcccaccaagcaaaccagcgggtaaaaataattattgatattaatgtcggcgatatattagtacaggtgtgaacggatatgaaaatacagctgaagatatttatggcggccaaatttatttgaccgctacaaatatcattatcagttatatatggaggttcatatattagcataaatacagttatttaattacgtcatttattaataactcatcaatttatatttgtaaggacacatcaatgataaagcatatccgtattttgcccggcgggctggcggtgctggccgccgttttgttctgcctgctgacggcctgccgcgatcacagtcgcgacgggatgagcggcgctgatataaatgtctataaccatggcccggacgccattgtttcgatgcaggtgaacggttacggcgggccaagagctaatccctacggcggcggcggcggcttctgctgcgtcatggtgcctgatgtctggcgcccgggactgacggcaaaaattacctggacttccgatcctaactcctggatgaaatcaagtgagatgccagatgattatgagactcactatcagaaacatgggccgattatcgtccctatcgaacgctgggaagaggatcaggcctgtggctttgatgtacatatttttccctgcgataaggtgcggatagtccgttcctgtcatatgcgtgactctccggaatatccagtgcaacctgaaccggatggaattaaaaaagcgcaaaacgtgcttataaatcatatcaaggaggagatcgtatgtccgacaccgcagactccacgctgaatgcactgaaggcgcttattgcggcttttcagaccggcgccaccccggtcgcggttaaaacctccaccgcggaagcggccagcttaccgccaaagtttcccgggccggatgatgaaaagcccgtgggtaaatccacacagcagaaaaccgaatacaacgagcgcggccgcctgccggcgagcagaacgcagaccgaaggcaactacgccaggcagtacctggagggatatgtcggggagtccgaacatcaatcggataaaaaaacggagccgggttgcccggccagcctgcatatcagcctgttcttcgacggtacctgttgtaatgaagagggagccgatgaggtatacggttcgcgtaacccgccgctgaccaatattggccgcctttaccatgcagccaactggacaactcagacatcgcctgcggaagcggacggttacttcagctactactttcccggctgcggagcgcgctttccggagattggcgaagagtactactcgctggacggcgagctgtttgccaacggcggcgaagaccgtatcaaccaggcgctgcttaaaacctacagtagcatctgctatgcggtgaacaaaaccgcgatcaaagacagcgaactgaccagatatcggcaaagtatggccaccgtctggcccttctcgcggctgacccagaaatttaaccgtaaaagcgcactcgataaattctgcgacgaccatctgggtgcagtggtcaaccagtggccgcggcagccgacgcggttgtatatccagcgctcgcagcggcgcatcgccaaaatcaagctctttgtctacggatactgccgggggccgccaccgcccgcgccttcgcccgcgggctggagtcgctgcttgatgatgcaaaaatgccgctcaatgcgacaaatatgctgccggcggggaccggggtgccaggcggcccgaccctgctgggcatccccatcagtatcgagtttatggggttgctggatacggtctccgcggttggcgtaccgcatatcctgccatcggccaccgggcatctgggctgggcggccaacagcctgcggctgccgaccaccaaaggcttcttaaaaagctgctaccactttgtcgccggccacgagcagcacggcgacctgccgctggactccatccgcggtccggacgggaaatacccggcgggagcggtggaggtggtctaccccgggatgcacgccgatgtcggcggcgactgtaagcccacggaactcggcaaggtgcagaccgatgccgccagcctgctgtcaaaggttgtgctgcacgatatgtatgccgccgccttcgatgccggagcgccgctgagcgtacctcctgaggtgttgcctggcggcgccaaagagaaaacctaccgtgtaatgaccaatgatgtattaaaacaattcaaaatctccgcccaggccatcgccctgtttaacgcctggcagcaggccggggcgcagcaggcggaggcgaagaccgaaacgccggccgtcaacgaggcggaggtggtggccatcgccgtggcccaggggcgggatccggtcgccgcgctgaaggcggctcacgacaaggcggatggcgataaggcgaaagccgcgggcgcgaagccgccggagaacggcccgctgggcaaactgccggatccggtgtatgtgccgctgaaggccaaagcgctggaggtgatgctggcggaccagcttagctggatcaccgcctggcgcaccgagcgctttgccagcccgcaatacgccggtaagtattatcagcgcaagcctttttatcagcaggcgctgaatgaatcgtccggcgcgttgccatcggcggcggcgcccgcggaaagcgaagagccgcgtgaagtgccgtttatcgataaggatcggctggaccgcgcggcgtggggctatgactttgcccataccggtatcgtggcgctgctgggccaggtgctgctggatgtgatccccaccacgcagaccaaccagcttggcggtccgctggtggcggcgcaggagtcggaatatatccagatcaagaaaagcggcgatgcccggcgggcggcgctgatgggctcgccgacgatgctggatttttacgataactacatgcatgacacgctggccaaatataatcacgacccgctgcactcctcgttttcccacggttattttgcgtcgcggacgatttacgataacgatgacgatacgtgggattcggtgaaacaatttggccagcgggtaaaagcgattatagatattaatgttggcgatatattagtgcaggcgcgaacggatatgaaagatctgaatacggtatcgggcgtgctgggtaaaatatatcgcgatataaaaagcgaggcttttaaaatactgctgccttaattcgttatcgccatattcattatatccgctaagtatccttaataacgctatacggcgtgatgatgcacgcccgtggctaagggaatcatcaattttatgttcaaggaaaaaaatgccgcggtaatgaccgtagcggctaccgcgaccctgtgtcttgccgtctggacaattgtggtcctgctgggcggtctgggatggtggaactggcacgccaaccgcacgctgcagtggacggcgatccgcgagatattaaccgtctgtggcctgatctgggcgtatggtctctgtctctggatactgggctttattgctttccacctgtttatcaggcaaaaagccgatgggcaacagcgtcagatgcggacttttattagccaacagacaaaaccggcgcagccgtttgcgtccttaaagcacactcttcgtcgccgctacggccgattgtggcgcaataaggtccgcctgctgtgggtcgctggcgaggcggcgcagattgccgccatcgttcccggccttgcgcaacagcaatggctggagggtcgcggtacggtgctgatccacggcggtagcctgtcggcgaaggtggataacgagcggctcagcgccctgcgtcgtctgcgcggccgccggccgctggatggtatcgtgctggcgctggacaatgctcaggccaccgccgcgaccctggacgggtatttgcgtacgctggagcaggttgcgcaggttctgcgctaccagccaccggtctatctgtggcaactccacgacagcgactggccgcaggatacgcgcattacccagacgctggggcgttgttcccgccgcgggccgtcccgcaggatgttgaacggcagcttcgcgccattctgcccgccatgctggcgcaggggacccagcagttgtgcgctgatacgtcccacgattacctgctgcgtgtcgctaaatggctgaaggagggcggtatcagcggctggaagacgctactgacgccgtggcttaccgggcatctgcaacagatcccgctccgtggtctgctgttcagcccatcgttaaaggcggcagaggcggtggacaatgggctctatccccaccgttggccggccccggccgtctggcaggggatcatcgcggactgcggccgcgcgcgcggcgtgccggtggggatggcgtggcgccgctctctcggcgtcggcctgctggcgctgattgctctgtgggcggcgggaagcctgctctcttttatcgtcaaccgccagcaaattgtcagcgccacccagcgggtacagctgctgcggcagcccgtcgttaacgaccagcagctgatcgatttgcaggtgctgcgcaacgatatcggccgtctacagaatcggctcgccaacggcgcgccctggtatcagcgctttggtcttaatcataatgcgccgctttctgccgcgctgctgccgtggtatgggcgggctaaccagcgtctgatccgcgacgcggcggcgcaggcgctgacccggcaactgaacgtgttggtcaacctgccgccgcgcagcccgcagcgggcgcagctggcgaaagcgggttatgaccagttaaaggcctatctgatgatggcgcgtccggacaaagccgatgcggcgttttaccgccaggcaatgaccgccgcgcagcagacgcgtctgggagtcgccccggcgctatggcagagcatcgcccccgatttatggggcttctatatggacaacttgccatcgcagccgacgtggagaatcaccccggacgccgcgctggtgacgcaagcgcgtcaggtgctgctggcgcaaatcgggcggcgcaacgccgaaagcacgctttacgagaacatgctgctgcaggtgcgccgtaactatgccgacatgacgctggaagacatgacgccgcagaccaatgccagccggttgtttaccacggaagaggtggtgccggggatgtttacccgccaggcgtgggagggtggcgtgcgcgaggcgatcgataaggcggtggcgaccaggcgcgatgagatcgactgggtgctgagcgatagccgccagaccgtcagcggcgatgtctccccggaggcgttgaaacagcggctgaccgatcgctatttcaccgatttcgccggggcgtggctgggctttctcaatagcattcgcttaaatccggcgcgcaatattgccgatgttaccgatcagctgacgttggcgggcgacgttcgtcagtcgccgctgattgcgttgatgaatacccttgcctggcaggggcagaccgggcagcagcgtgagggcgtggcggattcgctggtgaaatcggcaaaaaatctactcgataaggataagcagccgtttattgaccagcaggccggcggcgtgcgcggcccgctggaaagtacctttgggccgctgctggcgctgatgggcaaaaatccctctcagagcgttgtcgccgcagacagcacccttagtttacagacctggctgacgcgcctgacccgcgtacgcctgcggctccagcaggtggcaaacgcgcccgacccgcaggcgatgatgcagcagctggcgcagaccgtgtttcagggtaaaagcgtcgacctgaccgacacccaggagtacggcagcctggtggcggccagcctcggcgaagagtggagcggtttcggccagaccatgttcgtccagccgctgacgcaggcctgggaaacggtgctgcagccatcggcggccagcctgaacgaggcgtggcagcgttctgtggtcggcagctggcattcggcttttgacggccgctatccgtttgccgcgggcaaaaacgatgtctcgctaccgatgcttgcggcattcatccgccgcgatagcgggcggatcgaccagtttctcgcccgacagctgggcggcgtgctcaaccgggagggcagccgctgggtggccgatagcgcgcacagtcaggggctgactttcaatccggccttcctgaaggcgattaatcaactgagttccttgtccgacatcctgtttaccgacggcagtcagggaatggggtttgaactacagggggtggcgacgccgggcattgttgaaacgcaactcaccctcgacggccagaatctgcactactttaaccagcttgccgaatggaaaagtttccgctggccggggactatcaacaaacccggcgcgatgctgagctggagctcagtggcggcgggcgcccggctgttggcgaacgacagcggcccgtggggcacgctgcgtatgctggagagaatgaagcgtcagcagatcggcgatgggctgtttcgcctgacggtcaatacgccggataaccggcaactgcagtggctgctgcgtaccgaactcggcgatggcccgctggcgttgctgaaactgcgaaacttcacgttgccgacacagattttcatcgtggaggcctcccgtgcggaaccgtttgctgacggtgacgtagaggaataagggccgacattcacgctgcaagcgctgctttacaagcagcgagtttttcaattctgacatctgagatattccatggacgatttaactctgcgttattttgacgctgaaatgcgctatctgcgtgaggctggagaggagtttgcccgcgcccatcccgatcgcgccgcggcgttaaacctcgataaagccggcgcccgcgatccctatgttgagcgcctgttcgaaggttttgctttcctgatggggcggctgcgcgaaaagctcgacgacgacctgccggagctgaccggcgggctggtgagtatgatttggccgcattatctccgtaccattccgtcattggcgatggtggagttcagcgtcgactggcgggagatgaaagagccgcagcggctgaagaagggaacggaagtgatctcccggcccatcggcgagacgggcacccgctgccgttacaccacgacccagccgctaactttacagccgctcgcgctctcccgcgccagcgtcagggcgcaggccgacggtcgccaggcgatttgtctgcgttttgactgtagcgcgctggtggactggcgggcgctcgacctgagccgtattccgttgtatctgaacgccgatgcgccattggcctgcgcgctgcatgaagcgctgaccctgaatgtggcgcgcatcggcatacgtctggcgggggaggccgatagcaggccgctggcggcccattttgccgtttgcggttttgtccatgatgatgcgctgctgccccaaagcggcgggttcagcggctaccagttgctgctggagtatttcagctttcgtgaaaaatttatgtcggtcgcgctgtgcgggctggagaatatgacgtttcctgatgcgccgggatggtttgagatcgaggtcgtgctggataaaccgtggccgcaggagtatgcgttatcagagaaacatctgcgcttacactgcaccccggttattaacctgtttccgctggagtcggacccgctgcatctggattcactacaaagtgagtatctgctgcgccccatgcgcgtccaggatgggcacaccgaaatctattcggtggagtccgtcacctcttcccgtctttccggcacccaggcgtatgtgccgtttaccagttttcgccacaaaggcggcatgttgcgccatgatgcgccggaatattattaccacacgcgcgttaaacgtggcccgtccgggctgcatgatacctggctgacgctgggcggcgaggcgtttgaccagcatcgcgtgccgcagaatgaaaccctgtcattgagcctgatcggcaccaacggccagctgccgcggcgggcgctgcaaagcacgttgctggacacggtggtcaaatccacaacgtcgcgcctccaggtgcgcaatctcagcgcgccgacgttgccgtgttatccaccggatcgggatcgttttcactggcgggtgctgagccatctcggcagcagcttcctgtggatgatggataacgccgaggtgttgcgcggcgcgctggcgttgtatgactggacggacaacgaaatgaaccgccgtcgcctgcaggcgatcgtcgacgtgagccactgtgaggtggagcgttttgccgaggggcactttctacgcggcgtgcagatagaagtgacgctcgacggtaacggcttcgccgggcacggcgacatctgcctgtttggcgagatgctcaaccgcttctttgccctgtataccgacatccacctgtttaatcgtctgattctgatactgcaacctaccggagagcgtctcgaatggcaggagaaccacaaacgccgcattcccggctgagcccgcggctggagcgggatattcagcgcatcaacttttaccgcttctgccagttactggaaaaatcgcgacccggcgcgccggcattaggcagcacgctgaacccggcggatgatccggtacgctttcgcccgcatccggggatgggttttccggtcagcgaactcaaagcggtggagtatgatgaggcgcatcccgacgcgccgccgacgctgcgcaccacctttatggggctatacggtgtcgattcgccgctgcccaccgcctggctggatgacattgcgcagcaaagagaagggcatgaggcgcaggaagcatttctcgatatttttaaccaccgcattctgagccagttttatcgcatctggcgcaaatactcatatccggcaacctttgaagacggcggtcgcgactgtacttcacagagcctgctggggctgatcgggctgggtattcccggcaccgctcagcatattgccgcgccggtatctcgctttctggcattactcagcgtgatgcgcctgcccgcgcgtaccgaagagggaattcaggcgctagtacgattgttggcgccccatacgcgggcggaagcgtcgccgcactgcccacgaacggtgtacccggcgcagccgctgggtttttacggcgataacgatttcctgcttgatggctacacggtactgggcgatgaaacgaccgagattgccagccagttgctgatcgcgctttacaccgatgatatcgccgaggcagcaggctggatgccggaagggcaaatctatgcggactttctggttctgctgcgggtttatctcggttggcgctataaggccaaaatcaccttaacgcttcccacgccgctgttacccgcgccggtacttggcgaaacgccgtttatgctcggcatcaccggcgttttgggcatggaaggggacgcggttccgccggatttaccggccacgtttaccacggaactgggcggctaccgcggcatgccgcttgcaccattatcacaaggaaaccaacgtgttgcatatcacttcgcttaaactatccgcactgattattctgccgttcatgctggcgggctgcgggctaacacagaaaatcagcgacggcgcctcatccgccgtaaagtctgtattttatcgccaggtgaaaacgctgcgtctggattttagcgcgcgcaatgcgttaaacaccgataaccgcgaggataacagcgcttctcagccggtgatggtgcgggtgtatatcctaaaagatcgcaagaccttcgataagacggtttaccagcaactggcggcggaaggagaggacatattaaaagacgaccaactggccagccgcggcctggtgctcaaaccgggaacggagatgagtctcaccatgccgctggatgaacaggcgcagtatgttgccgtggtggcgctgttccgggcgccggatctgacgaaaaacgactggaagctggtgcttgcccgtgaggatcttgacccggaccgcgcgcgcgtcattgaggccagccatcatcaacttgttctgcaaccgcggaaggagaagtgagaaacgcgctgcgcaattttatattccataaataacctgacggacgccgtcatggccaaaccttttatctaaggtttggcctgtgagagctctcatttaaccgtgggcagatcgctatatcgggtggtgtatcgcggggagagcatttcccgcttcatctgccacggttgctggataccctggccggcgaagtaaagcgtcccacgtccgtcctcagcattcaggcgatccagcacctccatcaattcttggctattttttcgcggcgcattttcgtcaaacagattaagttgcgcgacgccctggctataaaaatcgcccagcatcaccccggctttctggtaccgacagccactttgccagatggcatccagacaacgcgtcgcggcggcgataatatctctgctgtcctgcgttggggtaagcagggtgaccgaggcattattgccgtaataccgttcatcaggcgcgaagggagacgtttttacaaagacggagataaaccggcagtattgatgttcctgacgaagtttctctgctgcccgggaggcataactacagatggcctggcgcatttcttcgtactcggtgatgcgatggccgaacgaacgggagcagacgatctcttgctttaccggggcaaactcttccagctcgaggcagggctcgccgcgtaattcacggacggttctttccagtacgacattaaagtgtttcctgatgaatcgaatatccgtgtcagccagctgcaataccgtccggatccccatcgtttcaagcctcttcgcgatgcgtcgacccactccccaaacctcttccaccggtagcgccgccatcaattttctttgccgctccgcattcgacaggtcaaccacgcctcctgtctgctgttgccagcgttttgccgcatgattcgccagtttagccagcgtttttgtctgggctattccgacgcccaccgtcaggtgtgtgcgttgccgcaccgtggctctgagctcatgtccaaactcggtaagaacgcggcaattacgtacaccggtaagatcgcaaaaaacttcatcaatggagtatttttcgcagcgaggcgacatctcttcaagcgtcgtcattacccggttggacatatcggcgtagagttcatagttgctactgaagcaaaccacgccatgatgtctgaagatatctttttgtttaaagtacggttcacccattttcacaaacggtttggcttccgcagaacgtgaaatcacacaaccgtcattattggacaaaacgaccaccgggcggccgcgtaagtccgggcgaaagacggtttcacaggaagcatagaacgagttcacatcacacagggcaaacacgatcagcccgccgatttcacgatgtaggtcaccacgccaaaaatttccagacactcttcactgccaggcataatcggctggtaggcgggattatcaggtttgagcatgacaacaggatgtaactggaggcgcttaaccgtgaattctccatccactgcggcaataacgatgctgccatggacggccttgcgggagctatccaccaccagtaaatcaccatcgccaatgccagcgccaatcattgagtcaccgcttgatttcacaaagtaggtggcgcctggatgctgaatcagcagttcattcaggtcgatacgccgctcaacataatcctgcgcggggctaggaaaaccgcagggaacaaggtcgctgaataggggtaatgccacgatctggcgtagttcggttagtgtgaaaaactgcatgatgatcaccgattatttttactgtatgtatatacagtattgtagatcgatggcagagatcaagagggtcgaaccttataaaaacctgcgccagggcccggcaggcggaggttttatgtctgaagccggttgataaacaatagattacctcatcgctaatattaacgacttcgctgtttagctggcgaaaatagcgcgacgattttatgtaaaaacaatctgaatatgactgggtaaaagatctgatattaacgagacaggcaatgtctgcgcgactaacgcgtggggattgctcaccggccgaccgtatgcaagagcaggccggtgagcaaatggctgtgatggcagttcgcagccgcggttattttaaagcgtccgggccggtttaaacatatttcttcgcgccaggagactattttcagacttacctcattaccgttgctaataagtcaaaccactaattaacgccaattaagaagactcaacgactaataatgacggtataaagatgaacaaaagcacagagttgaataattaagagtattcctgggtgaaatgtcgggcagacagatgacttctgataaatattcaggataatttatcaatcttaaggaatttgctccgcggcggcctgcaccataaaggaatccatatggttaatcggatatcgatcctgtcatctgtcgacagctcctcgttattattctggaaattcagcgggcaggagaaactgtccgaacctttccactttcaggtcgatttactcagccaggattttgctatcgaccgtcaggccatgctcggcaaaaacatgacggtggcggttcccggccaatggggcaggagcgttatctttccggcaaaatcaccgccgtaaccgtgcgtgccgaagatcttggcgagacgcgctacgccgtctatcagaccacgctggaacccgatttctggccgatgatgcgcgaccgcaacttccgtattttccagcagcagcgggtaccggatatcgtggccaaactgtttagcgagcataacgttaagtttgaggacaaacttacgcgtagctaccggcagtgggattattgtgtgcagtacgcggaaagcagcttccatttcatcagccgtttgctggagctggaaggtattagctatctgttccgccacgataaagacggccatactctggtgctgatggatgactatcagcaggctgaatccttccccggttatgaaactattccctggcatgcgcagccgggcggcggcgcggtcggcgaagagggcattagccagctgatggcgagccacgtcgtcacgccggggctttacagcaccgatgactatgattttcgcaagccccacgcctggatgctgcaaacgctgcagaatccggtctcgccgacgccgggcaaaatcgacgtttacgactggccggggcgctttatggagcacggcgatggcgaagcctacgcccgtattcgtcagcagtcctggcaggccgaacagcagcaaacgcagggtatcgccaccgcgaccggtatcgtcccgggacacacgtttaccctgacgcatgcgcctaacatggctgataacgctaaatggctggtggtgggcgcccgctatgattttgaagagaatcagtatgcctccggcggcggaaataccgcgcagcaccgcatcgcattcaccgttattcccgccgcgacgccatttgtccctgcgtcaaggaccgactggccgcgcacctacgggccgcaaaccgcccgcgtggtagggccgaaaggagaatcgatctggaccgataaatatggccggattaaggtgaaattccattgggaccgcgaaagccagggcgatgaaaatagctcctgctgggtgcgcgtttccagcgcctgggccggccagggttacggcggggtgcagatcccacgcgtcggtgatgaagtggtggtggactttattaacggcgagccggatcggccgattgtcattggccgcgtctataacgaagccagtatgccgccgtgggcgctaccggcggcagccacgcagatgggctttatgagccgctcaaaggatggttcgccggacaatgccaacgccctgcgttttgaagataaacccggcgaagagcagctctggctgcacgccgagcgcaacatggatactgaagtcgaaaacgacgagacccatgatgtcggcaataaccgcaccaaaaccgtcggcaaagacgaaaccagccatatcaaacagaaccgcacccgcacggtggatggcaatgaaagcgttaccgtcggcaaagatcgcagcaaaaccatcaatggtaatgaaaccaccaccgttgagcagaaccgtaccgaaagcgtgaaggggaatgagaccctaagcgttgagcagaaccgcgatgaaaccatcagcggcaaccataccaccacggtgaaaagcgaccataccgcgaccgtcgaaggcaagcagtcactgacggtagtacaggatcgcacccgtcaggtacagggtaacgaaagcgtcagcgtccagcagaaccgtaacgtgcaggtcaccggcaatcagacgctgggagtgaccggcaatcacgatatttccgtaaccggtaagcaaacgcagaccatcaccagtaagcaagaggtgacgatcggcgccgggcgtaccctgagcatcaccggcggtgatacccgctttacgcaagggagcgtaaccgacagcgctaccgataccgtacatatcaacgtgggcgaaagcggcattctgataagcaacggcagcgtggagattaccgctggcgggtcgacgatcaccattaacgccgccggcgtgatggtgaatggtaagaagattgagctcaatgcctgacagggaaagggaatgaacgcggcgaagaatccgaccgaaaaagtaatgagcgagcttgagcttagctggctggacgccagcgagcaggcggagcagatccgcttatttatctggcgggcgtctgccggcggcgagtcgctgcttgatggttttatcgcgctacagcagcaccccgaaggccgctcgctgccggatttgctgctggggttaaccacgccgttcgagaccggctatggctacagcgaggcgctcgggcgcgagtttgtggaacactacgaagcgacgccggatgccgctatatgggatgccgaacgctttcttccgacctatagcccggcgcagttgcggcagttgctgcaggattttgcgacgacatttcatgacgatttacgttatctggtgttggtgctgaaaccctccgccgtcagcgatgaaaaggcgttgaaccgctggttgaacggctggctggcgcaggaggcgtgcaacgccagactgttactgatcgacacccttgagcaaccgatctggcagccgctgtatgaggctcatccacgcagggtacggctgctgaccgatgacgtcgacagtatgaaagtgatgcatcaaaccgcgcgcgggcagagcgatccgaatcccgatcgcctgctgtttcgccgctatctggctgacgccatgttgctgctggaaaaaggcagcgccgcgcaggtggccgcgcgcggcggtatggcgcttggcgtcgcccagcgctgcggttgggccgaccagcaggcgatgatacataacctgatcgccggcggttggttgaaaggtaacgatcatcaacgggccgtcgatcactaccgccaggcgcaaaccatcagcggcgaaattgccgacccggcgcttaaaggacaactgcgtacccaaagcacttttggcgaggccggcgcctggttcgcgcgtaaagagtatctccaggcggcgaaaggctatcgccgggcggcgggcgaagcgcaaaccattccacacccggtatttgccgtagaaggctggcggatgtccggtttttgtctcaaccttgcggggcaccgggcaaaagcgatggaagagtatgcccacgccatccaggcggcggagccgatcccacggcaagagcgcgcccagaccacgctgccgctggcattccaggatctgctgcgcatccatgataaacggcggaccgaggcgcttgaggcctgcgcgacacgctggcaaagcgaaaaacagcggttaatccaacaggcggaagaccgcttgccacgggaacccgccgtcgaacaggtaaaacgcgtggaccggcagttacagctacaactggaagccgcgttcgcgctgatccgcgaagcgcgggaaaaactgatccgcggcggcgatgacagctttcgccgcgtgatccgcctggcgcgggagaagctgcatccgcactggaacggcctgccggagatcgcccaccctttgatgccccgccgggtgaatggcaaagcctgcctgcctggggaaataccgatgcatcatccactgaaaatgcagggagcaacccgctatgaagacccggattattattattgttgccgtgacgctgctggcaatcctgtttttaagcctttcggacggcgggttcgccaccgaagtgcgcaccttcctgcgcgcgctgctgcgcgccatgttctgaggcgcgtctgatgcactccggggctcacttcgacccgcagcttggcctggatatccatacttatccctggccgctgccgacgccgcatatcggcatcgttttcgacgtgtttgattatctgccgctgctgggcactaccgtacacgtcaacagcatcaaacgcgccagcgcgggaccggcggtattgcggtacatattccggtcggcggcgtgtgggtgccgccgctgcgcgcgcccggcggcccgcagatggaagacgagctgtttatgggcagcaaaaccgtcgccgtcgatggtgagccgttttcccgcatcggcatgccggtactgagctgtaacatcctcggaatggtaccgccgttccgcctgaagcggctgagcaaaccaaagccgctctcgctgacgctgccgctgacatttaacctcgcgattcccaacaatgtgattgtcggcgggccgccaaccatcaacctgatggcgctgctgatgcgcgccgggttaagcgggttgggcaaggggttgaagaaagttaaaaaaacgccgcagtggcggctgtttatgcggcggtttaaaaagctgcgccagaagctgtttcgcaacatggatcccggcgtcctgaaatgccgggtgctacgcgccgaaccggttgatatccgcgacggtagtgtgagcctggagcatgaggattttctgttacccggccgcctgccgctggcgtggacgcgaagctactcgtcggcggatctcgatgaagaagggctgtgcggttacggctggtcaaccccggcggacacccgccttgaaatactggccgatgaaggcgtcgcggtgttgacccagccggaagggatgacgctgtttgcggcgctgccgcagtccgacggccgcgagcagggtattgtcggcctgccggacggcagccgtctgtggcgggaaacccgcaatggcgaatgtttctggcatgttgagcaggaagggagcgcgtggctgcaatttcgcggtaaacgcgggccgctggcgatttatcggctggcggaccgtaacggtaacggctggcagttcgactggcaggggcgcgagctcgagcgtattcgcgagttcagcacgcgcggcatgagcggcagggagatcctcgtcacctggcaggatggccgtctgcgggcgctacgcctgcgcaacgcgctggatgacgagatcacgccgctgacccgctatgaatacgatagcgataatcagttgagcgcggagattgatgcgctttcgcatccgcggcgcttctactatcaacagcgccatatgaccagccatgtcgaccgtaatggccagggcttccactaccagttcaatgacgagtggcgggtggttcacgcctggggcgacggcggcgtatgggattaccatttcgcctggcacgacttgctcaacgaagtggaaatcaccgattccaacggccatgtaacttctgtcagctttgatgataacggcctgccggtttcggagatcgatccgaccggcggcaataccgtcttccactacgatgattttggccgtaccgtcgaactcattgagccagacggcagcgcgcgtcgctgggagtatgatgaacaggggcgaatgatcgccgaacatctgccggacggtagccagattcaggcggcctacaatgaagacggcgatgtgctgacgctgattgatgagaaaggcgcctgctggcgttcggactatgacgaacgcggcaacctgctggcgggaacggaccctaccggcgtcacctcgcgctatcagtatgatgagtacgggcaactgagcgtggcggacgtgccgggttccgggcagagtcgctatcgctatgatcggtttggttttttgcaggcgctgagccaggctggcgggggaaccactcaactgcggcattccgcgcgcggcaccctgctggagcgtattgacgccggcggtggtagcagccgtttccactgggacagcaaggatcggctggtggcgatggtcaatccgcagggcggcgaaattcgcgtcgcttacgaccgggaagattcaccgcttcacttcaccgatgaagccggccagataacccgttttcgttataaccgcaccggaatgctggccgcctgcgagacgccggatggcgcgacgcttggctatcagtacgacctggaagatcgcctgctggcggtgatcaaccagaacggtcagcgctggcagctggaccgcgacgcgctggggcgcatcgccgcggagaccgattactggggacaggtaacccgttatggctgggataaaggcaaccggctgatcagccgtgaggatccgctggggcggctggtgcgctacggttacgaccgcggcgggcggctaagcgagcggcgcagcggcgataccctgcaggcgaagtatcattacgatccctgcggacggatggtgctgtgtgagaatccgtggcggcggctggcgtggcgctatgatgacgccgggcgggtgctgctggaggaacaggacggttttcagctgcattatggctataacgagcgcggcctgctggtctcccggcgcagcgacagcggtcatcaggtgcgttacgccatggatgagtatgaccggctgagccagatccagctgaatgacgatgcgccgatcgtgctgggctacgatgaggccggtcggcgggtcagcgagcagctgtcggcggaggtgacgcgtcatttcacctacgaccggctcggccaactgacgtcacagcaggtattgcagaatgatttaccgctgttcgccagcggcttcagctgggataggctgggtaacctgacccggcgcgatgacagcctgtggggcagcgatcgttacgcttacgatccggtggggcgcttgacggcccataccgcgccggacggtacgctgcggcagtttgtgcaggatgcggcgggcagccacctgcagacgcagacccgggcggtgaatgagagcaccgggggctggttccgtgaggggctgcagcgcggggtgcgttatgtattcgatcgcgcgggcgagctgcgacagcggcgcgatgtccggcataacggcgagaaagaggatttcagctgggacgataaccgccaattggtggcggtgcgcaagggcgagcggctggtgcgttacggctatgacgggctggggcgccgggtgttcaagcagacggcggaagagacgcgctggttctactggcagggcgacgcgctggcggggaaacggtcactatcacccgcgaaccgctgacggcacagagcatttttgataccggcagccggctgcagcggcagaaagcgcaggaaacgctgttcagcagtatgcgcgagtacgtgtactatccgggaagttttcagccgctggcgctgctgacgcaggaagcgggcaggaaggagagctggcactatcattgtgacccgaacggcgcgccggtccgcctgacgtcattacagggcgagatagtgtggtcagagaagacgggcgtatggggagagaaagggaggtctacgccgatcgtatcagcaacccgctgcgtttccagggccagtattttgacgctgaaacggggctgcactataatcgacatcgttactatgatcctgaaattgcgggtttattagccaagatccgattggattagccggtgggctgaatgtttatcagtatgcgccgaacccgctgggatgggtggatccgtgggggcttaagtgtggtactgttgaatatcatcataagcagaagccaaataaagttaccgacattcgagaactcaaacgccagattagagggcagattagagccttcaatagaattttaaaagaggatggaatggctggccttaagcaacgcattaataattataatgctgccttagaaagagaggggcgagattatgttaaggattaggaccggctggagaaggaaatgtgtggttacatgagccagatatgcgagtaggtggtttacctggagatgtaaatagaattggtcttagtagagaaaattcaattatcggtgggaatgcctctcgaatcgctcgccagatattggatatgcctgacgatataacgaaattaacatcaaaactatttattgactaaggtggttttatgaatgacgctaaaagcattattaataaatatagatcaatgagtgactctgagaagattgaatatcttcgagggtttaatagttcactagatctaatgcttgctaattttttggttgatattgtcaaagacaaatcagaagatgaacttttacgaatagaagcagttaaaatattagggctctatagagggagtataatgatgagcttatcaagaaagaattattaaagttgattgttgatgaagatgatgatgaagaactcaaagtatacataattaatgcattttcactaatgaacatcagtgaatcggacatagattttttcttgagtgttattcgtggtgagtattatattctagtaaaagaggcggcattttctttgttggtttatcataaaaattccactcctgctcataatgcattgaatgaattattaaatgatgagacttttgggaaatcagctaagagggaattaaacctttaaatgcaatacgggcatgtgttttttttacatgcccaatagattaaagttttaaataatgttggtgaacatgtttgggtaatatgaaggtgataacttagaaaggatttattttaccagtgccggtatgctgcgaaacatctctttgtcagtatacaatgatggattgattgaaaaagatttcaattggggatgtatgggtgcagtgtatctgattatgtttatgaagactctattcttaagaaaatatatgttcagcaaaaagaacatgcagaatcatcttttacagaatttgaagttgtattttcgtataaaaatacgatcatcgataccattaaaaatgtatttcctaatggttatgaagaacaacgttatcctgcacgctgaattagctaattaaataacagcctgtgggcagcgatcgttacgcttacgatccggtggggcgtttgacggcccataccgcgctggacggtacgctgcggcagtttgtgcaggatgcggcgggcagccacctgcagacgcagacccgggcggtgaatgagagcgtcgggggctggttccgcgaggggcagcaacgcggggtgcgttatgtattcgatcgcgcggacgagctacgacagcggcgcgatgtccggcataacggcgagaaagaggattttagctggggcgataaccgtcagctggtggcggtgcgcaagggcgagcgcctggtgcgttacggctatgacgggctggggcgccgggtgttcaagcagacggcggaagagacgcgctggttctactggcagggcgacgcgctggcgggggaaacggtcactatcacccgcgaaccgctgacggcacagagcatttttgataccggcagccggctgcagcggcagaaagcgcaggaaacgctgttcagcagtatgcgcgagtacgtgtactatccgggaagttttcagccgctggcgctgctgacgcaggaagcgggcaggaaggagagctggcactatcattgtgacccgaacggcgcgccggtccgcctgacgtcattacagggcgagatagtgtggtcagagaagacggggtatgggagaaaaaggggagatctacgccgatcgtatcagcaacccgctgcgtttccagggccagtattttgacgctgaaacggggctgcactataatcgacatcgttactatgatcctgaaattgcgggatttattagccaggatccgattggattagccggcggactgaatgtttatcagtatgcgccgaacccgctgggatgggtggatccgtggggattagctaagtcatgtggtggaacaacaaaattttatcgttcaatgagtcatgaagatttcgagtatttacgcactacaggtaaattaagaggaacatctgaaacattcatttcaccaagaagagcattctctgagaattacgatggagttttagtgaggttttaccttaaaaacgatgcattatcagaactaaaatcaattggggttaaagattcagcagtacttaccagtattacttatccggacatgccagatgtagggaagggatggaaggagacaagtgcattctttaaagctgaagggaacagattaatattggattaggtaaaggtaaggcattagatatattcaatcaagggattcagcgattcgagaggttaaattaatagcatatgaaaattgataaaaaacaattaattgtctctttaatgaaaagagaaattgatatctcaaaattttataatgatttcaatgcattttacggtgaacttaacatatgctatgaacttgaattagctcgtcaaaatagagatgctgaattagttgatgttttttatatttgtcagatcttattaattatgattttaagtgtatagatttattgaatgaattgataataactgattggcataaaaaacatgaggatttagcaacgattctaaattactatcatagtgagactagtgttgaatacttatatcaagcggcgttgttagaactaaattatagagactatgatgaggattatgttctggcagataaatgtattagggcgctagccaaaataaacaataaaaactcaatcgaaaaattggaaaaattggctatggtagaaaatgaaaaaataaaaaaaagcgcaatgaaacaattaagtaaaattagttgagctaatgggtgttaaaagtcgtctgtccattacaggcgatttagaaaaatatttaaaactaatttaaagttggaaatgatatgttttttctgtagggataagtgttttcgccttgcaaaaatcgcctaaagagacgaggttgtgaatctcctgtacctgatgggtgatatcatgtagattaacaatccattcattacaaaaattaatgactgcttggtttcgaattccaatttgtattgtacggtaattaagtttatttagatgaatatctctctcaggatcccactgaaatataatatctgaattctttattttatcttgccattcttctttattttgaaaggttgatgctgaatgataatcacttggcaccctaaatgaagaattttttggaatgcgtcatgactcaagtctatagctaatattctcgtctgattgctgtctttttttccccagccagagcgatacatcatccataaaaatgatggcttaatccatgtcattctagtcaggctaaatggggagaaatgaacgtattgtttttaatcgcactatcagctatttcatcggaatatgcctgatagacacggataaaatcttttgtgaagaaggctctaatttgccgttctgggattgagtactttggtaaatgcttttccatcaatagttttaattgagttaattagttaaatagatattatacatggaaagttactctgataaaaatgtttcgtattgttgaaacaggcttttcccagaaaatgctacgacagaattcataataatatatcaagcagacggcggaagagacgcgctggttctactggcagggcgacgcgctggcgggggaaacggtcactatcacccgcgaaccgctgacggcacagagcatttttgataccggcagccggctgcagcggcagaaagcgcaggaaacgctgttcagcagtatgcgcgagtacgtgtactatccgggaagttttcagccgctggcgctgctgacgcaggaagcgggcaggaaggagagctggcactatcattgtgacccgaacggcgcgccggtccgcctgacgtcattgcaaggcgagatagtgtggtcagagaagacgggcgtatggggagaaaaaggggagatctacgccgatcgtatcagcaacccgctgcgttttcagggccagtattttgacgctgaaacggggctgcactataatcgacatcgttactatgatcctgaaattgcgggatttattagccaggatccgattggattagccggtgggctgaatgtttatcagtatgcgccgaacccgctgggatgggtggatccgtggggctgagttgccgaaaaaaatacatgggcagaacccccagcaaaaatagcaaaaccggacttgaagtcattgcaagaaggcgaggtgaagggcgaataagaggctctggcgattggatgcagtttaaaagttcaactgatggagtatggtaccgtatacaggatgctgatatggcacatttaacggatgcagttaaatattggaaccaaaaaggtgggtattacggacctaaatctcgtgaggtcagagcttttatgagagactccagaaattatgagcttgaatattatggtcacaatcgctctcagggagccttacttcctgacagatataaacattctggagattttattggcccagaagaaaaatctcagtatttccagtaaaggagtattgcactatgaaagaactcgaaaatccaagaattgaatccaaagttaactcctttgttgaaaaggaaatgagttgcatgatgacaaaaaatatgcacaggcgttagagcaatatgaaaaagcctggagtattttgcctgaaccaaaaccagaatggcaagttgctaactggatttccgcaaatatattcagcgcttattttgaccttggtgattacaatgaggcaaaaaaatggggcgaaatgacgttgcaaacgagagggtcggcgatagatacagcgccatcgatctgggtatggtttgttatgagctagaacaatttgatgaagcttacaaatattttaacgatgcttatagctatggaaaagagagagcatttaaaggtagacctaagaagtaccttgagttttttttaaataaaagggcatagtggaaattttataaagtaatcgaaaatgagagagtttattttttagcgagagtaagaactatttctttaaatgataaaaatccacgctactgtgtggtttttgcaatgcgaaagccatttagcaaatggaataatgtcgggaaaaagattccagccggcggcacagggtatttttgatactggcagccggcagcaccgcctgacgtcattgcagggcgagatagtgtggtcagagaagacgggcgtatggggagaaaaaggggaggtctacgccgatcgtatcagtaacccgctgcgcttcctgggccagtattttgacgctgaacggctgaataccttacttacctctctcgcggcgtcgccttcttactactgtacatcgctttatctgcactgttcagcaatgtatcggcatctgcggcatcgtgagggaaaagcgcaatgccgatgctgccggaaatcgtaataatatgctcgtggatcaaaaatgactgagttaacgcattgctgatcttttccgctgtttgtcgagggagcggatcgtttgcctttaaaccggggagcagggcgataaactcatcgccgccgaggcgggccaccgtatcaccttctcgtaaaacgctttgtagacggaacgccaccagccgcagcagttcgtcacccacggcgtggccgtaaacgtcattcactggcttaaagcggtcgagatcgataaagagcagcgccacttctgtctcattggcaatggcctgagtaatcgccagctccaggcgattactcaacagtctgcggtttggtaatccggtcagcgcgtcgaagttggcgtgcaaccagaccacctgctcccgctgtttacggtcggtgatatcgcgaataaacgcggagaaaatctgcttgcctgattgcgatgcggccagatcgacagttcgatagggaatttgcctttagttcgatgcagggcggtaatttcaatagttcgattaaggatattcgacggctgagccgcctgaaagcgcattaaaccacgcgcgtgctgctcgcgaaactcttccggtacgatcatctcgcccaggttgttgccgatagcttccccagcggaccagccgaacattctttccgcggcctggttccagttaatcaccacccctgcatgattgatggtaatcaccgcatcttgtgcggtttcaaccagctgtcgatggttctcctcgctttcggccagcgctcgctgcatcgactcaactcgctgatgctctcctacagctcacgatgcatttccgcaagcgaaagcgagaaaaagcgaatacgctcttctactgacatatttttcatttcggcgtacagatcgctggcgctacgtggtgacataaggcgttcctgatgaatcgaagagaatattcaaccaatttagcaataagtgtagttaaaaaaagatccgctgctgacatctcggctattttatatattaaataaaatctattgtaaatttgtccagatttaaatttaacgcttagttacagatggatcatattccggaggtaataatccgtactctttataaagagtattaaggacaatttatcgtgaatactttcttgcgtaacaccctggccgccgtagtgatgactgcaggtctttccgttgccgctcaggccgcgacgacagccgaagtgccgccgttatcccaggacccggtggtgcaacatctcaagctgagcaacgatcaggtcagcaaaattcaggccctgcgtcaggagctggaaacaaacctcaaaaatatcaaaattggtggttaccaggatggcgcgctggttgacgtgattcagtccggtaaatgggacgatgcgaaagtaaaacagcagctagccgcttttgcgcaattggatcagcagacgcgttattaccgcgtgaaatattacttcggcattaatcaggtgctgacggctgaacagcgcgagcaggtaaaaaaagatctgcagcaggctctcaactaagcaatgtcctaatgctccgctggccggcggagcattgatagtgactttcctcaatgaaaagacaagggtgtcatcatgaagaagtttctctttattgcgctgggaatggccgcgttgtttagccaggctggcgtcgccgggactaaaacgttggttgattatggcgtcgtacaggaaagccatattattagcgctccacatcagcgccagccgcttcgtacgctggcggcaggaacgctgggcggcgtggtcggccatcagttcggcaacggaaaaggccaaacggcgatgaccgccgcaggcgctctggccggagctggcgcctctcgctatcaccaggatcggcagcagggcgctcagcaggttgaactgttaatcaaaaccaacggtggccaggtgatacaggtgatacagggttacgacggtcggcttgtcttcaacaagggagataaggtgcgcatcctgacgtcgggaaatgatacccgggtggataaatcggtgtaacgcaggtaaatgggagccaatacactcccgtttggcgtgacatgttatgccgatttcagcatatcaaagcggattatccgcgaacgtcccagctctttcgcccgatacaacgcggcatctgcggcacgtagcaggctgtcgctttgcgcgtgttgcggatagctggcaataccgatagaaacattcacctggcctatatccgtcagcccacagcgtaaagtcatatttctcacgttgttgtagatttcagtcgcgcaggcttctgcgctggcctcatcgctgccggaaagcagcactaaaaactcttcgccgccatagcggaatgccatgccaagatcgcgtaccgcgcgctggatgatcgccgcgacgtttttaatcaccagatcgcccgcctcatggccgtaattatcgttaaccgccttaaagtgatcgatatcaatcatcaggcagctcagcgggctgttgttgcgcaccgccagattcatctgcgtatgcagcgcttcctcaagatgatggcggtttcgcaatccggtcagagaatcaaacaacgctttttccagcagagcgttgcgcagacgctggttggacagcgccagacccagcgcttccgccatgagttcaagataagcgcgagagggggctgtctcactggtgacattacgaaaagagagcaggccaatggcttctccctgcgcgatcagtgggacgcacaatgagtgctcgttgcattcttgcggcagatgatagcaggcgatgtccggttcgccgttaaccggcggatggctcaggccgcgacgtactgcccagcagttatcgggataaaacacggccgcctcgtccggtggcgaaagccactgcgcgacgcagcgcatttgccagggatcggtatcaagaatatacagccggccaggaacgtccggcgcgatgttgggggcaaaaagttcagcgaccttcaccacatcctcaaatgactcacatccctgcaagcgttgagtcattcgcgccagcagttcacgaacggcccagtcggcatcgcgttgttgttcaaggcgctggcgggcaaggccattttcgcgaaagatgcggatcgcctgcgccatatcgccgatttcatcaatctgtttgaagtgcggtggttcgacggcataatcctgcgatgccagacgctgtaccacatcgctgagtcgtaccacaggggtgagtacccggcgtttgagaataaagccgagaacaaataaaaacatcaaggcggttagaccgaccatcgcttctgaaagcgtgcgccagaggcgtgatttttcagtagcttgctgtatggcgttgttcgttcggccttccagcagctggcggaaatgatcgatttgcgtttgcacccgctccagctcctgctcataaggcttgctgtatagctgcaaaatcgcctctttctcttcgccacgagcgacgtgatcgatggcggcctgctgttcatcttgtaattcatcggtaatacgcagaccgtcgcgcaacagcgccagttcctgcttgctggcgccaatatcttttagtttaagcaatcggttttcaattgatttgagagctcggcgctgctggcgataccgttgcagcgtctccggttgtttttcgatgacatacagtcgcgcgaggcccgatagctcccacgcgtcgcgttctacctcatcggcaaggcgaacgaacgtatcgcgttgctgtactgcctggcgttcagcgcgatcggcgccggaagccattagcatcgcaataccggatgcaatggtcagccctacggtgatcacgtaggcccagttagtcatggtggcgattctcaccggatatttccttgcaggcagatgaatgagaaattgatatttttattatagagccccgtagccaaccgaaaggttcagacgcgcggtatgcgggtgacgaggtggtgtagcgcctgggcatgctggcgcaaaacaagatacacatcgttatccagagcgccatttataacatcagcttctataagatgtaacgcctcctgatacggcataccgagccgataagggcgatcctcaacgagcgcggtaaagatatccgcaatagcgataattctgtctggaaggtgtaaataacgatgactcaaatgaagtgggtagccgctgccatcgagtttttcatgatgatttgcggcccaatcaatgatttcagccagatcggtgaaatctcgtaatatttcgccggtcatatagctatgttcgcggatcaattgcgcttcgtcgtcgctaagttcagcctgtttttcgaggatcgccagtggaatatatattttgccgatatcatgcaaatagccggcaatttcaattttgcggcacaccagcggcggcagatgcatatagacggcgagggcaaaagaaatttcgccaaccatgatgctgtggctggcggtgaaactactgtaggtatcgacaattttcgcgatcagcaaacaaatatctttcagaccatcgatgtcaatagatacgtcgttaatcggcccgacgatctccagcaaccgctgaatatgctctgcttgcatatggcgccagaaggtagggtgttgcgccagttcacacagagtatcgcaaagtggcggatcgatatcgcgatagtcagcgacaaagcgcgcgatgagagcactttgttggtccggggcaacaatgccttgcgaagggagtagacgctcaaaacagtccgcgaaatagacgatatgctgttccagattgcctttgcgggttgggctgaagtggtgatcgccaataattgggctgataagggtaaaagtatccaggccggcaagcatctgtacgccacggatttggtgcgggtcataaaggttgtctattgcgtttagcgagtcaatgcgccgcttatcgccaagtacgccgatatcatgcagtagcgcggccagaaagatggttttttgttggggcgcaggaagatccaacgctagcgataatttgtagcttatcagcgccgtgcgctgtaaatgcagatccagccttgggttgatggcgttaatgacgcgcgtgaccagcattaaagccgactttaaggcaatacgcatttttctctccgtccatgcaatccgctgttgccgttaatcctgtggcgccgggaagcatactcaaatgctggccggacgcttcgcgagtgaagcgccgcctatcagagacttcacccattctccgtaaacaattcattttagcttacttcgtcgcttccattctggtaatagagtgatgaatctcttcacagtttgattcatatctacctgagatgagaactgattgtttttacatcacctttcgcggcgctgtaagggcgggttggagcatgggcaaatcggccatcatgttttgtccgtctctattttgcgaagaggaattgaacatgaaggcgtattgcctgaatagggcgaaaagtaacaactatgggatattttaatattgttgcaaacgtgattattagtctcaattatatatttttgtcagtatttatcagctagcataaataatcctgttcttatttatattttataatgacttcaattttaatcagtcagtgtggcctgtaaatattattatctttagtaatgatttttagtgaatacatttggcgttcgtatgatttttggtcgtttgtgctcgggcttaggtacggcgggaggcggcgtcagcagtggactgcgtgaagttgtgttcaaaaaatagccagatagcagtttaagttcattcctatatcggaaaaaatcattagcgcgaaaatgattattagcgtaaatatgaatgaacggacttcatttttactttacattttgtaacatctgtgtatctattatgtattttagcgttaagtgtaattttttcttgctgccgtgaatttaccaggattactattgtcttactcattgtatcgcctaatgacggatgaagggactcgtttttccttaagcgttaccctatattttaatgtttacaggaaaaaccatgtcttgcgcctttaaaaaaatctactgcttccccgctattgggtgacctggtttggcctggccattctttggttaatcgtccaactaccttatcccgttttacatacgctcggcaccagcgcagggcggctatcgcgtcgcttcctgaagcgtcgggaacatatcgcccggcgtaacattgagctgtgcttcccggaaatgtccagcgcggctcgtgaaaagctgctggaagagaactttatgtccctcggcatggggcttattgaaacgggtatggcgtggttctggagcgatgaacgcgttaagaagtggtttgacgtcgaaggcatcgccaacctgaacaatgcgctcagcgccgataaaggcgtgatggttgttggcatccactttatgtcactggagctgggcggccgagcaatgggcttgtgtcgtccgatgatggcgacgtatcgcccgcacaatagcccgcttatggagtgggtacagacacgcgctcgtctgcgctcgaataaagcgatgatcgaccgccgtaatctttccgggctggtgcatgcgctgaagtccggtgaagccgtgtggtttgcgccggatcaggattacggcccgaagggcagcgtatttgcgccgtttttctcggttccacaggcggcgacgactaatggtacctgggtattgtcgcgtctctccggttcgaaaatgctaagtatcagtatggtgcgcaagctggatcgtaaaggctacagcctgcatatcagtgaagtcatgaatgattatcccggcgaagataaacagattgccgccagttatatcaataaggttatcgaacgcgaaatcctgcgtgcgccagagcaatacctgtgggtgcatcgccgattcaaaacccgcccgcttggcgagacctcggtatattagtacaacacttgcgctccgcgctttcaaaatgaccgcagttgcgttaacgtgagccggatcatactttttgttgaaagcgaaggagtgcagcgtgtttgttgagtttggtgttttgaattatctgacctacctggtcggggctatttttatcattctcgtaccaggtcccaatactttttttgtactgaaaaccggtatcgcgcacggcgtgaagaaaggataccttgccgccgctggcgtgtttatcggtgatgcggttctgatgttcctggcttttgctggcgttgcgacacttatcaaaacgacaccggtgctgtttaatattgtgcgctatcttggcgcgatttatctgctttggctgggcgccaaaatgctctactcggtatttaaacagcgcgaggggcaagatgccgccgatgctgagccagggagcgctatcctcaaacgctcattaaccttgagcctgaccaacccgaaagcgattcttttctatgtctcttttttcgttcagttcattgatgttaatgcgacatcgccgggcatcgcgttctttatcctggcgctgacgctggagatcattagctttgtctacatgagcttccttatcctttctggctcgtttgttacgcgttatgtgaaaactaaaaagaaactggcgaaattgggcaacagccttatcggtctggtctttgtgggttttgccgcacgcctggcgacgctgcagtcctgatcccggaaacgttctgccagcgataatcgctctgttgtaacaaaaacccttcaatttttattgcattggtgttacatatacagccgattatcgctcacagagaagggaacccggatgattctgcaaaaaatcctcagtaataaaaacggcaagaagtttctgttgtcgatggcgacggtatttgccattgcgcttgccgtcgtaggccgcgcaacgttcggtggtgtggtgagcgaatacaacatgccgtactcggagtggacaacctcgatgttcttcctgcaggggctatggtgatggtttacagtaccgtgttcaccgtgttatttgctatcccgcttggctttctgtttttaggttctgaccgtcaggactaaatgcaaaaaggcgaacatttgttcgcctttttaaatgatcctatctgtcaccagtcacgatcatgatgatgatggtggtggtgtcggtgatggtagccatcatctacgatacatcccgataacagcgtgcacagtgcaataatcaacggtaacaccatcggttttttcattactcacttctccagttaatgcccactctgctgcataaacacagcgaagcggctgatgaaatgagtgtatcgccctaacttattgagtagataagacaactctgcaataacggggccgcgggaaaatttgagattaccaccagcccaattcggtaccggcgaccaccacgatagcgacgataatcataatgatggttgtctttttcatgatgcccccctggcgccgcatagccgccaacaaaaaaccagcccagaaagaccacggcgacaatgaaaatcaccaccggaaaaagaatacccaatttcatgcttagttcctgtctcttaacgtaatgttatctatcatactggaaagttatgctttctggtcgatatcgaaaatggtcagcatgcggcgtgagtttttgtcgtggtacatagcctcatccgctgcgcgtagcgcctgttcaacgtccatattctgcggatcgacgtcgatgaccccaaagctggcgccggggtattctataccgtgtccggccaggcggtaacgcccggtaagctgctggcgcaggtgggcaataaacgcctcctgttcagatgattcaagtgccgggccgatgattaaaaattcatcgccgccgaggcggccaacggtatcttcgtcacgtacgttggcgtttaggcgttcacctatctggatgagaaaactgtcgccgcaggggtggcccagtttatcgttaatcgccttaaaatcgtcgaggtcgataaaaataagcaggagcctgcgttgctgggcgcgagcttgggtaaaaagcgttttaagatgtttaaacaacgcgcggcggttggccagaccagtcaactcatcggtattggagtacatctccagcgccgcatttgcactgcgcaattgctgaaccagcgtctctttctccacgtaatgggagatcaggctggcgaacaatgtcattacctgctcgccttccagattatagggctgtttgacgcggctggtggcgcacaacgtaccatataacgaaccatcggcaagatggacgggaatactaaagaacgtggcgatcccgagttcctgcgcggcggtgcaggaccgccagcgttggccaacctcgttgcaaaatatacagttatcatcgattgcgcgtttgcaaagcgactcgtcccagggaacggaaaagccttccgggatctgcatttcgctgctgttgtgggcatacatgactaactggcgctgcgcttctaaatcaatccgtgtcagatatgtggactccatacgagtcaccagttccagcatttccagcagttgtcgcaccaacgtttcgagcgttcgttcggtagcaagcgtctgtgagacgcgggcaagaatgaagtctgacatgaatgaaacggccccggaggttagcgcagtactgcgagctggcgcagcgaacagctaataacaaacatatttataacgaatgtatcacatttagcagggggatatctgctatcgagacggtaaaatgcgatgaaccaaaaaaagccccatcgggggcgatggggcaaaactcattgattatggaatgatctgttctctggtcaattcgagaacgagcgctactctaaagggcaaaagtgtagttaaaatggagaaaccgtggagattcagggcgaaaggtcgctttgaagaaaacaggagcaattatgaagtggattgtaatgatgttgccgctggcgttagctggctgcgctcagtcacaacagcctgatgcgccgccgccgccaaattcgatcggtatggccaatccggccgccgtctattgcgaccagaagggcggtaagcaggttccggtccagacacctcagggcgtacgcaccgactgtaaacttcccagtggcgaaacgctcgatgaatgggaactgtggcggcgcgatcatccggcgaaaaaataattcgctgccgttagattaagcttttcagccactccgccagcaccagcgcatggttttgttgcgtatctttggccgcgtagagcagcgttaagggttgctggtcggttaatttggcgagccgtagcccttcatcgcgatgggtttcaagctcttcgcggtactgctggcggaagtgagggaagtcaatcgcttctccgtgtagagccttgcgtaaatcgctggaaggcgtcagggttttacaccattcgtcataatgcaaatcctctttttttattccgcgtggccacaggcgatcgaccagcacgcggtaaccatcgctgacctctgcagggtcataaacgcgtttacattgaatcatcattattctcccgtggttatgtctatctggcggcttgcccgtgcagcgtgccgctaaataaccattgtgttccgcgaatgatatcgctaatctgaggttccttgtgttgcccgataatcctcagacataaggatcctgctatgaacacccctttgcgcattgcccttgttggtgattataaccctgatgtgattgcccataaggcgattccgctggctattgatgacgctgccgcggttctggaacaaccggtgagttatgactggatagccaccagcgagattaccagcgcagaccagctcaccgattatgacgccatctgggtggttcccgccagcccgtataaaaacgccgagggcgcatttatcgccattcgctacgcccgcgaaaatagcattccgttcctcggtacctgcggcggcttccagcacgcgattatcgaatacgcccgtaatgttatgggatggcaggatgcggcgcacgccgaaaccgatagcgaagggcgaatggtcattgcgccattaagctgttcgctggtggaaaaatcagacgctatcgagctgcgcgcgaacacgctgattgcccgcgcttatggccgtgacagcattgaagagggatatcattgtaactacggcattgccgaaagctttgcccatgaactggagcagggcgcgctgcgggtgaccggttgggatgagaacggcgagatccgcgccgtggagttaactacccatccgttcttcgtcgccacgctgttccagcacgagcgcaacgcgctggaagggcgtccggcgccgctggttcaggcttttctgcacgcggcccggcaataaaaaatcggcagccctggctgccgactcttgtgattaatgaatttcgcgcgcccttccggcaagggcgccgaacagcgccatgaccactgcgatgagtgcgacgatgattaacggtatatgccagtcgccgtaagcatcatggattttaccgatgagcggcggtccgcaggcagccagcagataaccaatagtctgcgccatgccggagagggccgcggcctgatgcgctgagctggcgcgtagaccaataaacgtcaggccaaggatcatggtggcgccggatccgaagccaaaaatcaatgtccagatcaccgcctgaccgggcagtaaccataatcccagcgtgcttactacgcacattaaggctaccagaacggcgatgccgcgctgatctttcaggcgatggagtaccagcgggatggccaggcccggcgcggcggtcgccagctgcaacaggccatgcagagagccagcctgcgcttcgctgtagcccatactctgcaggattgcgggcagccaaccgacgataacgtaatagaccagtgagttaatcccaaggaacagcgttacctgccacgccagcgctgaacgccagatcccccgattgtgcgcggcgcccgatccggtcatcggcgtggtagcctggcggcgcgcctgcggcagccagagtaatagcgccaacagcgggaaaaccatcagtagcagcagtgcgccgcgccagccaaaacccgccagcgccagcggcaccaccatcgcggaacctgccgccgccgctgcgcccatggtaatggagtaggcgccggtcatacgggcgacatggccggaaaaatcacgcttaattaaccctggcagcagcacgttgcccagcgcgattccgcagccaatgagcgccgtaccaatatacagccaggctgctgaggggagggaacgtaatccgatcccgaggcaaataatcaccatcgccagcagcaggctacgctctatgccgaatcggcgggcgacgccggccgccagcggagagaccagcccgaaggccagcagcggcagggtcgtgagcagcccggtttgcgccgtcgtcaattggtattcagcgcgtatcgcatccagcagtggggcgataccggtgaaagttacccgtagcgtggcggcgataaataaaattccgacaatcagcagcagtttgttgccgttggcagaggaagaaacaggactcataacgttctcagactaataaacagggtcgtaacaatagcctgtttaacggttgtttgaatcaagctaaaatgacagattatcgctaatatcggacaatttgatgattggactgggtttagacggctatgaaccagacagcggacatgaagcggcgctggcgtttcgcattcaggtggtggacgacgagcagttcattccgcgccatcagcaccgcaaaggtcaactgatcctcgcgttgcacggcgctttaacttgcgaagtggataacgccatgtggatggtgccgccgctgtatgcggtgtgggttccaggcctgcttccacacagcaatcgcgcaacgccaggggcgcaggtgtgttttttgttcattgaaccgggggcggcgccgatgcctgagcattgctgcacgttaaaaatctcgcccttggtgcgagaattgattatgacccttgcggaacgcggcagggaggcgcttgacgcgccgcctacgcagcgcctggtgcaggtattatttgatgagctaccgcaacaaccgcaggaacatctgcagttgccggtttcaggacatccgaagattcgccggatggccgacaccatggcccgcgatccggcgcactggcagacgctctcgcagtgggcggcggcgttcgccatgagcgaacgcaatctggcgcggctggtggtgcgggagaccgggcttagctttcgccgctggcggcaccagcttcagttgatcctggcgctgcagatgctggtgcgcggacagacggtacagcaaaccgcccagacgctcggttatgattcaacaaccgcctttatcaccatgttcaaaaaaggattagggcaaacgccgggccgctaccacgccagtttggctaagcctttccgataaaaagcgaaataatgccggcggcgataagcggcccgaccgggacgccgcgaaacagcgctacgcccagtacggtacccaccagcagtccggcgaccaactgaggctgcgaacccatgagcgcgactccacgtccgccaagccaagagacgaacacgcccacggcaatcgccagcagtgatttccagttcacaaaagagtgtaacagtgtcgagggaggtagcgttccgctggcgataggagccatcacgccgatggtcagaatgatgataccgatggtcagcccctgcttttcaatccaggggaagaaaacattaagcggcgtcacccgcacgatgatgagcaccagtattgagatagcgacagtagtgttatggctgataaagccgagcgccgccagccccagcaaaataaacagggttgtatcgaacatgccagagatccttgccaaaataaaaaaagaaaacctgcttactctacgcataatcgcgtgaataaacaggcttttaatttatttgctgcaaataaggctaccagcgccgcctgcgaatcttgtcgcataccagcgatgcgctaaatgaggcgacggaacgcgaccagctcagggcgggcgatacgcagataatcctcggtattcataatgatcgatttttccagcaggccggcattaaaggctatctctgtaaaacgttcgaacagcaacgggtcggcgaccagttttagcttagggtggaagctaaacggcggaatggcgccgaatacgcaggcggtaagggcatcgacctctgccgggctggcgagtgaggctttattgccgccgatatgctgcgccaggcgggataaatcggcctgctgatcggcggcaaggatagccagcacgtgctggtttaccccattacctttcactttacagaccagcgctttggcgccctgtcccagcgcggtaccgcggattgcagatacggcttcacatttaccaatggcttcatgttccatgacccgatagcgggcctgttgctcatcaaggaggcggcataaccgctggtgtatgtcggctgtctctggcgattgcatgttgcgttagttcctatactgaaaagacaaagcttaaccccgcgcggcggtaatgaaaacttatctacgaatgtcggggctttttttctgctttttgttcatatacaggcgcgcatcggcagctttcattgcttcgctgagcgattgttctggcgcgagatgttccgcgccccaggaaaaatcgacgcgctgttgattgtcatgaatcgccagatattgccggatcctcgccgggatattttccgcttcactttccggataatcgatcagaattagaaagaactcatcgcctcctaagcgcacgccataatcgctgctacgaatggaagcggaaatagcctgcgccagtagaataattgcttcatcgccggcgttatgcccccaggtatcgttaatctttttcagtccatcgcagtcaagggctatcgttacgacgttaaccccttgcgcggtaagtcgttgcaggcgcgactccagcatcggggtaaggattttacgattataaaggccggtcatggtatcgctgatattctctttcgataccgagttgtaaaggcggaaatgaacccgcaccagatgcagtaatgcggcggtagagagtaaataaaacaggaagagtttccacgaactgagcagaaaatacataacatccagagacagcgttatccgtaagttttctgccacctgatgggtgtaatgggcgtaattcaacaggtgtgttttactatgatgtacctcaatgagcgcgccggtatcggaatccttcaaggtaatatccagatagcgccacaccagcggtcggtcgctggtatacagcaacgcctcaatctcttgcgcggttacatcgaccatcactacgcctttcagcttatccttgaaatacactggtgttaaaaacgataaaatattctttcccgtcatcgcatcaacatacacggtcgagatgagcgaacgaccctgctctaaaccatcgaggctggcctggctaatacccagtttactgtcctgaagaaaattccagttctgtatcggattacttttaattctgacgggcgcataaaagtagatgtatttatttaccaggtctatgtaatagcgaaagcgtttttctgatttgagcgtcgcgggaacctctggctgccagctatcatttttggcaaccgcccgatcgaatgcctggagtgcaggaatatcgctacgccacttgccgcagtcggcatgcgcggcgcttagcgtgccatgcaactggggataggtatatccggcgatattcaaaccactgacatccccgttgtgttgtacgctattgcagacctgttctacctctgcttggtttggggagtatccagcttacgcagaaactgagagatgatgagttgattctgatacttatcatagagaaaggtcgattctcctttttctatgatgtatcgcatatagcctgacatatcgcggtgggtagcgattaattcgtataccagaaaagaagacgtcaacaccacaacgcctgcggaaataacatgtcgcagtaatttattctgtaatttcatgatgtttggattcgtcttacccgtttagctgattttatcatagtggataaacaggctaccagagcgtgggtgaacgaacggctggtcagattaactatgctgacagattgtgtaggtgtggagaacgaggcagggcagactaactaaaatgcggcactcttcatgacgcatgtctgaagagtgcgcaggactggccaaaggccactcatgaggcggcggacgcaaacattttgcttccggcgagttgtgacatgacaggctgataaacatcgatagattcgatattgtcaaaagtcaccatgtcggatttgcaaaaaatgcatttcgcgccgaaggggtttttttcgctcacatcaaaatgtgaggttctgtattgtgacccatggcagcacgggcatcggaaatgaatattgttaatcataaatttatccttttatattattatgtttttttacattttgtcactcacccacagatgaatatgtaaatttctgatgggctgaactgcaaaacggaaatatcttttgcgttactactaaaaatagcatggctgacagattatgttatcaatttatgccattttttgttgatttgtatgagatgcttcttatttatctactcaggtcaaaaccgtcatcgttatcgtaaatcagaagttcacatcaaatttagccggcgtttaaccgttttactaagtcattactcttattagtcatcttctatccaattttttaatgtggcaaagcatacaggatttgatttgcagaagaatcttaatactaatggagagactcaagaaaggtggtatcagcgatagcgcctggaggtgtgagtaactgcttgggtaatatctttctgtctttcaaatcgacgtagccattaacgcatagtcgagaaaatagtgcaacatttattttagccgtccagaagcccaatgcgtaaaggattaatacggtaattatctaaatgtaaatgaacggaacctgtggctggctataaatgtgttttcgctacagaaaaatcagccagaatgggtatttatctggctgatttatgggactaagtattactggtagcgccttgtttatgaaacagttcgcggaacaccggataaatatcttcctgatcgcgaatatgctgcatagcaaaattctcaaacgtcgcctgcagatgttcatattcgcgccacagagtctggtgagcgcggcgggtgatttcgatatagctgtagtaacgaaccaccggcaatattttcttcgccagcagttcatgacacagcggcgagtcgtctgcccagttatcgccatccgacgcctgcgcggcataaatattccactgcgccgggtcatagcgggctttaacaacctcatccatcaacttcaaggcgcttgaaacgatcgtaccgccggtttcctgggaatagaaaaactcatgttcatccacctctttcgcctgggtgtggtggcgaatatagaccacctcaacgtttttataggtccggctgaggaacaaatacagcagaatgtaaaaacgtttcgccatgtcttttgtggactggtccattgaaccagaaacatccatcaggcagaacatcaccgcctggcttgaaggctctggtcgtttctcatagtttttatagcgtaaatcaaaggtgtcgataaacggcactcgctcaattttagcccgcagttcagcaatctctttacgtagccgctcttcttccaacagctgcgctggttcgcttttggcaatggtatcgagatcgtcttcgagcgcccgcagttcgcgtcgtttaccggcggtcatcgcggttcgccgcgccagcgaattctgtaatgaacgcaccacgctgatattggccggcacgccgttggcggtaaaacccgcacgatgggttttgaactcgttcaactggcgttgctggttcttcttcaggttgggaagagccagatcttcaaacagcaggtcaagatattcatctttggaaatctgaaagacgaattcatcctggccctcgccatcggcgctggcctgcccctgaccaccgccgcctccgccgccgccgccctgagggcgttcaatgcggtcgttctgcacaaagtgatcgttgccgggatggacgcgattacgaagcccgccgcgcccctgatgaaacatcggttcgttaatatcgtccgtcggaatggagacggattcaccgctgtcgatatcggtcaccgaacgtttattgatggcttcggagatcgactgctttatctgcgccttgtaacggcgcagaaagcgctgacgattgacagcgcttttgttcttcccgttcaggcgtcggtctatgaaccaggtcatatgccctcctgtactgcatttgccaactgtaccctgatgttgattagggtagatgtctttcgttatacgagcagtggtgctgaaacccggcagccgcggctaccgggttggtcgctatcaggacgatttacgtacccgcaggtaccattcgcacagcaggcgtacctgtttacgggtatagcctttttccatcatgcgatcgacgaagtcgtcgtgttttttctgctcgtcggtagacgttttggcattgaacgaaatgaccggcaacagctcctcggtattggagaacattttcttctcaataaccgtgcgcagtttttcataactggtccagttcggattacgtccgctgttattcgctctggcgcgcagcacgaagttgacgatttcattacggaaatctttcgggttgctgatcccggcgggcttctcgattttctccagttcagaattcagcgattcacggtcgaacagttgcccggtatcaggatcgcggtactcctgatcctgaatccagaaatctgcataggtgacatatctgtcaaaaatgttctgtccatattcggaataagactcaagatacgccgtctggatctctttaccgataaactcggcatatttcgggatcagataacctttgaggaattccagataacgttcggcctgctcttgcgggaactgttcgcgttcgatttgctgttccagtacgtagaacagatggaccgggttggccgccacttcggcatgatcgaagttaaacacccttgagagaattttaaaggcaaaacgggtagagagaccgttcatcccttcgtcgacgccggcgtaatcacgatactcctggtaggatttcgctttcgggtcggtatctttcaggctttcgccgtcatagacgcgcatcttcgagtagatgctggagttttccggctctttcaggcgcgacagaattgagaagcgcgacagcgtttcgagcgttcctggggcgcatggcgcatgggtcagctcactgttattcaacagtttttcataaatacggatctcttccgagatgcgcaggcaataaggcactttgacgatatagacacggtcaaggaacgcctcgttgtttttgttattacggaaggtcacccactcggattcgttggagtgcgcgaggataatgccgttgaacggcagggcggagataccctcggtaccgttatagttgccttcctgggtcgccgtcagcagtgggtgcaatactttaatcggcgctttaaacatctcgacgaattccatgatcccctggttggcgcggcacagcgcgccggagtaaccataggcatccgggtcgttttgcgcatagtgttccagtttacggatatccactttccccaccagcgccgaaatgtcctggttattttcatcaccgggttccgttttggcgatggcaatctgttcgaggattgacggccacactttcacgacgcggaatttagtgatatcaccgccgaactcgtgcaggcgtttagccgcccacggcgacataattgtgccgagataacggttaggaatgccgtattctttattgaggatctgcgcgtcctcctgcgggttaaacaggcacagcgggtgatcgttgaccgggctgcgttcgccattcgcgctcagcacgtagatcggcactcgctgcatcagcgatttcagacgttccgccagcgaggatttaccgccgccgactggccccagcagatacagaatctgttttttctcttccagaccctgcgcagcatgtttcagataggaaacaatctgctcgatggcatcttccataccatagaactcttcaaacgccggatagcgtgcaacaacccggtttgaaaagaggcgggacagccgcggctccagggccgtatcgaccatgactggttcaccaatggccgtcaatagccgctctgccgcgttggcataagcactgcgatcttgccggcagatggtaagaaactcctgcagtgtgaactcttcgtccttggcagcttcatagcgctggcgatagtgatcgaatatattcatggcatgccgtcctttcgttttttagcacaggttgagagccgttcatatgaatagtgggggccccggaaggggcaggctgaacgacgtccttctacatctcagcaaccctcgtgccaggttacagaagcgatttggataacgtgctctgcgactacaccttctaaatttaagcgtagatgcatttagaaaacttgcatgccgctaaaactcaatttcaatgacatatcaataactcatccggaaaccaggcaatttttcgcatatcttgccaaagcctttcatcaatgtgtcatgaagtcgcaagaggacggtcatcaagcagtgggaaattgttcggtttagtgtaagagcaagtaaagcatttgaggcatgacctctacgacgttaaactgcacgcgctaattatttgacaacaggaatatggatcgtgactaaaatcaaacttctggcactgggtgtgttcatcgcgacgtcagctggcgcagtgcacgctgacgggaagttaacgctgggggccggcgtgggcgtcgtcgagcatccttataaacaatatgatgcagatgtttacccggtacctgtcattagttatgaaagcgataacttctggttccacggtttgggtggtggctactacctgtggaatgataccaacgacaaactgtccgtgaccgcttactggtcgccgatgtatttcaagccgggcgacagcgacaattcgcagatgcgcaagctggaccgccgcaaatccaccatgatggcgggtttgagctacgttcataacactcagtacggattcctgcgtacgacgctggccggcgatacgctggacaacagcaacggcattacatgggatctggcctggctgtaccgttataccaacggcaacctgaccctgacgccaggtattggcgtggagtggaacagcgacaatcagaacgaatactactacggcgtctcaaagcatgagtcgaatcgcagcggcatgcgcagctacgatcctgacagcagctggaacccgtatctggagctggcggcgaactatcgtttcctcggcgactggagcgtttacggtatcgcccgttacactcgtctgtctgacgaaatcaccgatagtccgatggtggacaaatcctggagcggcctgatttcgaccgggatcacctataccttctgacagtgcactttcacagacttttttgtgcatcaaaacagggcgtcatgccctgttttgctatacggtggtgcatcacatagaggagatcatcgatggcgcacacaaccttacctttcggcgatcagccagccgtaccggtcattggtctgggaacctggtatatgggcgaacagccggactcgcgtaagcaagagatcgctgcactacaggcgggcatcgatcttggactgacccttattgataccgctgagatgtatgccgacgggggcgcggaagaggtggtcggagaggcgctacgcggacggcgcgatcgagtgacgctggtgtcaaaggtctatccgtggaacgctggcgggcaaaaaatgcaggttgcctgtgaagccagtctgcgtcgtttacagacggactatctggacatgtacctgctgcactggcgtggcgaattcccgctacaggagacggtctccgcgctggaaagcctggtccggcaggggaaaatccgccgctggggcgtgtcgaatctcgatattgatgatatgcaggcgctgtggcgcgtcgatggcggccagcgctgcgccactaatcaagtgttgtatcaccttgcgtcgcgcggaattgagcggcagttgctaccttggtgccagcagcaacagatgccggtgatggcctattgtcccctggcgcaggcggggcgtttgcgccagggcctgctgaatgaccccgttgtaaacgagattgccgatgcgcatcaggcgacagcggcgcaaattttgctggcgtgggcgatcgggcatccgggagtcctggctatcccgaaagcggcttcgatatcgcatatggaacaaaatgcgggcgcgttggcgataacgctttcggcggatgagctggcgcgactggataacgcctggccaaggcctgcgaaaaagacaccgttggatatggtctaaaaaaacgcccgacggttatcgggcattttcgtttaccggttttgcgcgttgattaacgcttcacaacgcgaatagtctgcgccaggcgagtgggtttctcttcgctggctttctgcggcgtggtcacgcagcaggtttccacgcaaacgaaagttttgtagccatcatccgtcatatcacccatgctgacggaaagcgccgggcctgggttccaggcaacgacgttaccgtgatggcgatggatcacgtcgatgttgcgctgcaggacgtcatcatgaatcacgctgcaggcttcggcattgagataaacgcggtcggtgcggtccgggaaggtctggatgccgtctttcagcacgccttcttctgcattcagcactttatcgacatagcgatcgccaaggccgctcactttaactgccgcgatatcgccaacgttgaagtaggtgtgcagggcggatgtggtttcaaactcgccgtgggcttccagttcgatctcgcaggtcttacccagcttgaagcgcgcatagagcgtgaagtcgtgcggccagtatttgcgggtttcgtcactgctctgcagttcgaaggtcagcatcacgccgttttcatcttcgtcctggcattttagcgcccacggcaggttgcgtgcgaaaccgtgcgacggcagtccctgttgcgctgacggaccgaaccatggccagcagatgggtacgccgccgcgcagggcgacgccgcttttaaatggggtattgttgctcaaccacaaaacttcttcttcaccggccggttgccatgagagcaggtgagcgccctgtagggcgacggaagcttttacctgcgggtggtcaacgacgataagttcaagatcgtccagcttgcggcgggagaatgcaggagaaagttgttcaatcaccgggagagcaaaaattttattaatcattacgccatcctctttcaggcaaaaaaaagagcgaccgaagccgctcttattgattacttattcatctcaacttatttggagatgtgagcaatcagatccagaactttgttggagtaaccagtttcgttgtcgtaccaggaaaccagtttcacgaagttgtcgttcagtgcgataccagctttagcatcgaacacggaagtgcaaacttcgccgttgaaatcggtagatacaacgtcgtcttcggtgtaacccagaacgcctttcattgcgccttcagaagccgctttgattgctttcttgatttcttcgtaggacgctgctttttccagacgaacggtcaggtcaacaacggatacgttcggagtcggaacgcggaacgccataccggtcagtttgccgttcagttctggcagtactttacctaccgctttagcagcgccggtagaggacgggatgatgttctgagctgcgccgcggccgccgcgccagtctttgtgagacgggccatcaacggttttctgagttgcggtagtagcgtgaacggtggtcatcaggccttcaacgataccgaagttgtcgttgatgactttagccagcggagccaggcagttggtggtgcaggatgcgttagaaacgatgtcctggcctgcgtaagtgtcgaagttagcgccgcgaacgaacatcggagtgttgtctttggacgggccagtcagaacgacttttttcgcgccagcggtgatgtgtttacgagcggtttcgtcggtcaggaagataccggttgcttcagcaacaacgtcaacaccaacttcatcccatttcaggttagccgggtcacgttcagcggtaacacggatttttttaccgttaacgaccagatgaccgtctttcacttcaacggtaccgtcgaaacgaccgtgagtggagtcatacttcagcatgtaagccatgtactctgcgtctaacaggtcgttgattgcaacgatctcgatgtcagaacgtttctgagcagcacggaaaacaatgcgaccgatacggccaaaaccgttgatacctactttgatagtcatatattccaccagctatttgttagtgaataaaaggttgcctgtaaaattacaaaaaccttacgcagcgtcaagcggaatcgtgtcaatcattgcgacaaatcaatcctgagcagacctttgcgcgattgatttgcctcactctccctttgagcccaattccatatggggactgcgtccggaattttaaaggtcatataagataaaaatgtgattagtatcacaattatctggctgcctgatggcatcggataagtttagaacaaaagtacaggtttcattgttaatgttttgttagaattgacgggtaaagttgccctttcaaagcgagaagtaatcacatggctaataaaccatctcctgacgagctcaaacaagaattgagcgagatgcagttttatgtgacgcagaatcacggtaccgaaccgccgtttaccggacggttgctgcataacaaaaaagacggcatctaccactgcctggtctgcgatgcgccgctatttcactcacaatccaagtatgactccggctgtggctggccaagcttctatgagccggtgagtgacgacgcgattcgttatctcaatgattactcccacgggatgcagcgtactgaaattcgctgtggcaattgcgatgcgcatctggggcatgtcttcccggatggcccgcagccgaccggcgagcgtttttgcgtcaattcggcctctttaagcttcaccgatgagcaaaacggcgagcgaactaaaggctaagaaacgattcagcaaattattccaagacggatgagcagaagatggatatcgagcaaattattgccagtatgacgccggaactgtaccaacgtttagccaccgcggtggagttaggaaaatggccggacggcgttgcgctgaccccggaacaaaaagaaaacagcatgcagttggtgatgttgtggcaggcgcgcaacaacacggatgcgcagcatatgaccatcgacaccaacggtcagatggtgatgaagagcaaacagcaattgaaagaggatttcggtatcgtgccgaagccgattgcgacgttcaaaccgcagtaacctgcctcatagagcgcccggtttagccgggcggctcttcatgacaccccggtcgcgcagtgcttccggggagggtgttttactgcgtcttgatacctagcgactcggccagttgtcgggcaagctggtttttgtcatctgcgccatattcccagaacatgccgcccgctaaccctttgctcttgatgtactcggctttgatcgccaccgaacgaggattctcgtaggacagggcgaaaagcgctttgccatcggcagagtttaccgataaccacggcaccttcgcttcgtcatcccagtgctcagtaaagcgtttctgcggatcgttgagcagtttggcaacaatatcgttgtatttcacataggtatctttgctcaggtcataacccagcgatttaaacaactcgatttgctgcgccccgaagtaaggctgggtagccgggtttttctgcgcgtctggcttactccagtcaatccctggctcgacggcacgtttcggtacccggccatagaaaccaatgccgagattcatctggctgggtttgaggccagcagccagatagttattcaccacaaaatccgcgctgtatttatccgctgtggcgacggtcggccagtggcgggagtcatacagattggagttgaaatattgcgtgccgtaggccatgtcgtaggtcatcagattgatgtagtccagtagtggggcgaccgctttcacgtcgacccagctttttggactttcaacattggcgccaacggcgatggtcaccagtttcttagtgccgacggcggcacgtagttctttcagcaacgcggtaaagttatcgcgatccgccggctggctggccaccaatcccaggcgccgttaaccggaaattcccagtcaagatcgatgccatcaaggccatattggtcaatggcctgctgaaccgaacggataaataccgcccggctttccggcgtggccgccgcgccggaaaatccacgcgcgccccagccgccaacggagagcaggactttcagatcgggattttgctgacgtaacgccggcagtttttgtaaatccgcctgtacttttggcgacagccagatttgatggagatgctcaggatctttcagcgcctcgttggtctcgcctttttcatcgttgtaaatcaggccgaacgagtagttaaggtgggttatttgtcggacatccagcttgtcgatatctccgccggggcctgcggtgacgtcgccgccgccgttaaagtagccgaccgacatgaaagattgcgcggaaacgacagaggcgcagagcaggggtaatgctgccagcaagggcaaaagtttcatcggagttcctctttgacaatgatatacccgtcatacttcaagctgcagatgcgttggcagcgtgcactcaccccagtcacatagttatctatgctcctggggattcgcgcccttgccgcctttctacaacttgaattatttagggtataaataagcacacgccacggaaatggcgtggcgaaaaaacagcctgcccacagtatcagcccttatccggggaaactgcgagacagctcaatttatcgaggtcaacgaggcggtaaataccgcccggcgtgaggcgcgccgggcgtgaggtcagggctgggtttccagccagtcatcaagggtgtagagcgtagctccggcagcggccatttccataaaggcgactgcgctgtcctgcggctgcaggttgacgccgcgacagccgtcggtgatcacgttgacggtgtagcccaaatccaacgcatcaagcacggtaaacttaacgcagtaatccgtcgcgaggccgagaatgttcagctccgtcacgccgtgcgcgcgcagccagccatccaattcggttttctgccggtgaccattgtcgaaaaacgcgctgtagctgtcaattgccgggttttgccctttatgaaacacggcgttaatagcctgctgttttagaagcgggtgcagcgcggcgccgtcgctatgctgcacgcagtgatcgggccagaaagtctgcggcaggccatcaagctcgccctgggcgtagggttccgcctgatgctgactggcaaagctaccatggttggccggatgccagtcctggcttgcgatgatggcgtcgccgcgcgccagactccagtcgatcagctgatttgcgatatcaatggtgctgtcgccttcggggacggcgagtgcgccgccagcgcagaaatcgttttgcaggtcgaccaatagcagcgcgcggtggctcatagcatgttccttattcatcgggggtcagctcgccgcgcaggtttcgctgcatggcgtttcgaatggccgcaccatcaagattctgactgagcagatagtgtagcttggtcagcgtcgcttccacggtcatatcaaaaccgctaatgactccggcctgcgccagcgcgttgcccgtggcatagccacccatattcaccttacccgacatgcattgcgtcaggttcaccaccacaatgccgcgctggctggcttccgccaggacctgaataaactcgccgttctgcggcgcattgcctacgccataggagcgcaggatcagcgctttcaccggctggcgcaggaaattacgcaccacatcggcagaaatcccaggatagatagtgaccacgccgataggctgcggcgtaatcgggtggacgatcagctcgccatttccgtgcggtgccggcggggtaccgagacggcggatatggatgcctgcttccagcagcggtgccaggtttggcgaagcaaaggcatcgaaaccgtctgcgtgggccttagtcgtgcggttaccgcgatacagacgattattgaagaacagcgaaacttcgttgatcgggtagttggcggcgacgtacagcgcattgagcaaattgatttgcccatcggaacgcagctcggctagcggaatttgtgaccctgtcacaatgaccggcttacctaaattctccagcatgaacgacagcgccgaagcggtgaaggccatggtatcggtgccgtgcaggataacgaaaccatcgtattggtcgtagtggtcgcgaatgtcgtcagcgatatgctgccagtcttccggcgtcatatcagacgagtccatcaacggcgcatattcatgaatagtgaagtccggcatctccgggcggtggaactcgggcattagcgccagctggcgctgcaggtggccggaaacgggaatataaccgtgatcggagcgctgcataccgatggtcccaccggtgtaggcaacgtaaatcgatttcttttgcatagcatcgcttaggttggatgtgaacaggcgcagtataaagtggcaggcaaaaaaataaagcgctaaccctgggagttgcagagaagcgcttgaatttaatgtcgttgaaacgctgccccacggcgggggcagacggggattaacgaatattggcgcaggtcagacagaaggcatagcgattctgcggatcgttaaatgccgccagtttatcgctttccgttttcacaacgtccgctgcagccgcaaccggcgcaggcaggtatgcctgaatcgcggccggcagagcagcgcgcaccgaaccggtcagactatccatcaccatcgcaaagaacgtcggttcttcctgataccaggtaatatgccattgtttcagtttcgccagctccgcggctttcgccaccgcatcgtcgaaatcgccgaggctatctaccagaccattggctttggcgtcttcaccggtccagacatggccttgtgcgatttggtcaatcttctccggcgtgctcttacgcgcgttagcaaccagggtgataaagcgtttatagccattttcgatgctcagctgtattaactgctgcacttccggcggtagcgatttggtggttgagacatcggccagtggcgaagtggcgacgccatcggtatgaacgccaatcgaaccgagcgtattttccaccgtgttaatcacgccgaagataccgatggagccggtgagggtgctcgggttcgccacgatgtaatccgccggggtggagatccagtaaccgccggatgccgccatgccgcccattgagaccaccaccggtttacccgccgctttcgccgccgccagctcttcgcggatgacttccgaggcgctgacgctgccgccaggactgttgacgcgcaggacgatcgctttcactttcggatccaggcgcgcgtcgcggatttgcgccgcggtggtgtcgccgccgacgttacccggcgtttcttcaccgtccatgatggcgccattagcaaagataaccgcaaccgccgaaccctgttcagttggcgctttgacgttgtaatcgtagtagctgatggcgcgatagttgttatccgctttgctccagccaaactgcttagtcagcgctttttccacttccgtcgaggtggccagctcgtcgaccagcttgttatccagcgcgtatttcgcggtatcgccatcaactttacgcaggccgtcgatcaccccctgagcgccggggaacagctgctgcgcggtgatctggcggttagcggcaatggtgttgagatagttctgccacagttcgccgatccaacggctgtccgcttcacgcgcagccggcgacatgtcgtcgcgaataaatggctcgacggcggatttgtaagtaccgacgcggaaaacgtgggtcgagacttttagtttatccagcagcgacttgtaatacaggccattggtggcaaagccgtgcaggtcgacttcaccctgcggcgagagccaaattttattggcgaaactcgccaggtagtattgcccctgggtgtagctgctgccgacggcatataccggtttaccgctgtcgcggaactcgcgtagcgctttaccgatgtactgcatcgagggctgatcgccgccgacgaagtttttcagatccagtacgataccggtgatattacggtcgtctttcgcctggcgaatcgtctgtacgatatcgaacagcgagttctcctgcagacgatcggaactggcgccgaacagctggcggccgatgaccccgagcttgctgctggcggaaggcttatctacgaccacgccggtgatgtccatcagcagcgcgccgcgtgcggtatgttccgcggtgctgctgctaaactgtgcccagatgccgacgcaaatcagcactaacaccaggaacaccaggttcagcgcgaattggcgaatgaaattgagtattcgccatgtccatttaaaaaatccggcaagaaatcgccaaagggttcgcatgtattctccctaatattttgatgatgggtcagccgcaggggctgccgcgtctggctatcctaaagagagtgccgacgcttgtcagcaggaatcacccatcgggctgtaacaaaatccatgcgcatgttaattttatgcaaaatgacatcacaggagttacacagatggatgctctcgaactactggtaaatcgccgcagcgcgtcgcgcctgaccgatccggctccggctggcgaacagctggaaaatatccttcacgcggggatgcgcgcgccggatcacggcacgttacaaccgtggcggttctttattattgccgatgatggccgcgaacgcttcagccaactgctggaaaaaggggcggtggccgccgggcaggatgaaaaagccattgaaaaagcacgtaatgcgccgttccgtgcgcctttgattatcgcggtggtcgcacgctgcgaagaacatccgaaggtcccgctgtgggaacaggaaatgtccgcgggatgtgcggtgatggcgatgcaaatggccgcagtggcgcagggctataacggtatctggcgtagcggtgcgttaaccgagagtccggttgtccgcgaaggctttggctgccgcgaacaggacaaaattgtcggtttcctctaccttggcacgccgcagttaaaagcatcaaccacgtttgcgcgcccggataccgcgccgttcgtcacgcgcttctgagtcagtgcttgttacgccggatggcgctggcgcttatcggggctacagcgctgtgcgatttggtagcccggagaaggcgcgttaagcgccgcctccgggaattcaagggcgatatagttacttctgcgttttggcgaattcatctttggctttctgcaactgctgttggaaggccgggttggtatgcagggtcgccaccaccgccgagccgactatccgcgccgcatcgacgtcgctctgccaatgatagccgcagataacccggctttcgcccagctcatagccgcgtttgagaatttcgttttgccgctgcggattgatctccgccagtaccagcgcggttgcccaaccgatagaggtgtggccggacgggtaagatccgtttttcgacagcttgtcctgctcggtagtgttacaggttgaaacgccgtagaacgcaaacgggcgaatgcgcatatatttctctttcgcgctgcgggtggccagatcgccggcatcctcaatcatatttgtcagcagcttatgtaactgcggcgcgtctttttcggtgatgggcgaaccaaaagcgctggaaaaggcattcgcgacgccgccggcgctcaggttggcatcttcagctgccagcttgccgcgctcggtattgcgcagcagccgtcctttctcatacatcgcctgatcgtttaaaaatgcgatgctgccaacttccggcggcggtggcaacagcgccagactatcgatggcctgtgcatttttcagataatagaggtccggtttggtggtcgcatcattgccggcagggaccagcgcgaaagcgttaacggaaaacaggctggcgaggcagagggcgagaacgcgctttttcatctacatttccttacggtgttatatgtccagaacaatggttttgtttttagtcacatttttgtcatctgtaagtaaaagttaaaatcacattgaaaaaattgttcggtatcgcaaaaacgcatatttgtctgcttaatgagcaaccactcgcgatttcggactgtcgcacttatcaccttgccgtttgggcgctaccatagcgggattgcaatgacaggagatgtccatgagcgagcaagctattcgtttaacgcaatacagccacggagccggttgcggttgtaaaatttcccctaaagtgctggaaaccattctgcatagcgagcaggcgaagtttgtcgacccgaacctgcttgtcggcaacgaaaccagcgacgatgcggcggtctacgatctgggtaacgggacgtcgatcatcagcaccaccgattttttcatgccgatcgttgataatccttttgattttggccggatcgcggcgactaacgccatcagcgacattttcgcgatgggcggcaaaccgattatggcgattgcgatacttggctggccaatcaacacgctggcgccggagattgctcgcgaagtggttgaaggcgggcgttttgcctgccagcaggccgggattgcgctggcgggcggtcactccatcgatgcgccggaaccaattttcgggctcgcggtgaccggcgtggtgccaaccgaacgtatcaagaaaaacagcaccgcgcaggcgggctgcaagctgtatctgaccaaaccactgggtattggcgtgctgactaccgccgagaagaaatcgttgctgaagccggaacatcaagggctggcgacggaaaccatgtgccagatgaaccttgccggcgccgcatttgccaatatcgaaggggtaaaagcgatgaccgacgtcaccggtttcggcctgctggggcatctcagcgaagtctgccgcggcgcgggcgttcaggcgcagctaaactacgccgatatccctaaactcccgggcgttgaagcttacattgccgccggggcggtgccgggcggcaccggacgcaactttgccagctacggtcatttgatgggcgagatgccggcggaatggcgcgatctgctgtgcgatccgcaaacttccggcggcctgctgctggcggtcacgccggaagctgaagccgaagtccaggccgctgccgcggaatttggcattaagcttgccgccattggcgagctggtaaccgcccgcggcgggcgtccaatgatcgagatccgttgattagatgcggttgtttattgcagaaaaaccgagtctcggtcgcgctatcgccgatgtgttgccgaaaccgcatcgcaaaggcgatggctttattgagtgcggcaacgggcaggtggtcacctggtgtatcggccacctgctggagcaggcgcagccggatgtttacgacggccgctatgcgcgctggaacctgctcgacctacccatcgttccggaaaagtggcaactgcaaccaaaaccgtcggtcacgaaacagctgaacgtcatcaagcgcctgcttggcgaggcgcaggaagtggttcacgcgggcgacccggatagagaagggcaactgctggtcgatgaggtgctggactacctgcagctggcgccggaaaagcgccaacaagtgcagcgttgcctcattaacgacctcaacccacaggcggttgagcgggcgattaaccgcctgcgcgcgaatagcgagtttgtcccgctgtgcgtgtcggcgctggcccgcgctcgcgccgactggctgtatggcatcaacatgacccgcgcttacaccattctcgggcgtaatgccggctatcagggagtgttgtcggttggtcgcgtacagacgccggtgttggggctggtggtgcgtcgcgatgaagagatcgagaacttcgtcgccaaagatttctttgacgtcaaagcgcatattgtcacgccgaaagacgagcggtttatcgccacatgggtgccgagcgaagcctgcgaaccctatcaggatgaagaggggcgtttactgcatcgcccgctggccgagcatgtggttaaacgcattgaaggccagccggcaatcgtgaccggctataacgataagcgtgattccgaaccggcaccgctaccgttttcgctgtcggcgttacagatcgaagcggccaaacgtttcggcttcagcgcgcagaacgtgctggatatctgccagaagctgtatgagacccacaaactgattacctatccgcgctcagatagccgctacctgccggaggaacattttgccggccgccatgcggtattgaacgcgattagcgtccatgcgtcggatctgctaccgcagccggtgatggatccggagatccgtaaccgctgttgggatgataaaaaggtcgatgcgcaccacgcgattatcccgaccgcgcgcagcagtcaggtcaaactcaacgataacgaagagaaggtgtacaacctgatcgctcgtcagtatctgatgcagttctgcccggatgcggtattccgcaagtgccagattgaccttgatattgctaacggcaaatttgtcgctaaggcgcgcttcctcgccgaagcgggctggcgcgcgctgcttggtaacaaagagcgcgacgaagagaacgacggtactccgctgccggtggtcgccaaaggcgatgagttattgtgcgaaaaaggtgaagtggtggagcgacagacccagccgccgcgccactttaccgacgcgacgctactgtcggcgatgacaggtattgcccgcttcgtgcaggataaagagctgaaaaagatcctccgcgcgactgacggtctggggacggaagcgactcgcgccgggattatcgagttgctgtttaagcgcggtttcctgaataaaaaggggcgctatatccactcatcggatgccgggcgggcgctaatccattctctgccggaaatggccgcgcgcccggatatgaccgcccactgggaatcggtattgacgcaaatcagcgaaaagcagtgccgctatcaggactttatgcagccgctggtggggacgctattccagcttatcgatcaggcgcggagcacgccggtgcgccagttccgtgggctggtcgcgccaggcggggcgaaaaaatcgtttagtaaagggaagggcaagccgaaagggaaaaagccggcgacggacatcgcgccggaaagtccgcaataattttcttcgcccctcgccacgaggggcttagctaaaactcacttccgcctgagggcgcttcacccggctgagggttttcccacgtatcatttccgcctccctgctctaaaataggattattgatgttaaagaagggataaaaaggaaaagatgatgagcgaacaaatcagtaaacaaccgcaagttgaccacgctgaagagaatgcttttttcccttcagcctactcccttagtcagtttaccagcccggtgtccgatctcagcggcgctgattatgcatcagggtatcgcgggcggcggaaagtgctggttatcgccgccgatgaacgttatctgcctaccgataacggcacgctcttttcgaccggtaatcatccggtagagacgctattgccgatgtaccatctgcacgccgctggtttcgagtttgatattgcgacgctctccgggcaaatggccaagtttgaatactgggcgatgccgcgcgaagaccaaaagattatgccgttcttcgagcgttatctgccgcagttccgccagccgctggcactttcagatgttgtggggcaactgggggctgatagcgactatgcggcggtatttattcccggcggccacggtgcgcttatcggcctgccggagagcgaagccgtcgccgaaacgctacgctgggcgctgcggcacgatcggtttgtgatttcgctctgtcacggcccggcggcgtttctcgcattacgtcatggggagaatccgttaaacggttatgccatttgcgcgtttccggatgctgccgataaacaaacgccggatatcggctatatgcccggtcacctgacctggtattttggcgaagcgctgaaagtgatggggctggaaatcgtaaacagcgatattaaaggtcgtgtgcatcaggatcgtaaagtgctgaccggggacagtccttttgcggcaaatgcgctcggtcaactggcggcaaaagcgttgctcgacgaatatgcaaagtaacagcaacctgatgatgagggggagcagtgaagtatatctcaattagtcacccgggcggcccggaggttcttcagattggtgaaggcgacatcccttcggttggtgataacgacgtcctgatccaggtgaaagccgctggcgtcaatcggccggacatcttacagcgacaaggcgtttatccgatgccggaaggggtaacgccgatacccgggctggaagtcgctggtgtggtcgcggcggtaggatcgcaggtgacggattttcatcccggcgataaggtttgcgccctgaccaacggcggcggctatgcggagtattgcgcggtacccgcggggcaaacgttgccaataccgcctgggctgagttttagcgaagcggcggcgatacctgaaactttctttaccgtgtgggccaacctgtttcagatgggcagggcgcaacctaatgaaagcgtcctgattcacggcggggccagcggcatcgggacgacggcgatcctgttgtgtcatgagttaggtatgaaagtatataccaccgtcggacaggaggaaaaagtggcggcgctgcgtccttatgccacggccatcaattacaaaaccgatgatttcgctgagaaaatcaatcagctgaccgatggtaaaggcgtcgacgttattctcgatatcgtaggtggaccctattttaatcgtaacctggaactgctgaagcgagatgggcggctggtgattatcggctttatgggcgggcgaatcgcccatgatgttgatattcaaaccttgatgctcaagcgcgcgaccgtgacaggttcaacgatgcgcggccgaagcgcggaagaaaaaaggcagatcgctcaggcgctgaaggaccatgtctggccgttgctggcgcagggtaaatgtaaaccgctgatttacgccagctatccgatgactgaaatcgcgcaggcgcatgcctgtctcgatagcggtaatcatctgggtaaagtggtaatcaccatggcgtagagttgatatccccgacgcctggcgtcggggataaagacacagattaaatcacaccctgcgcaagcatagcgtcagcgaccttgacgaagccggcgatattggcgccgcgcacgtagttggtctgtttctcttcgccgccgtattcgacgcaggcgtggtgaatatccaacatgatgtgatgcagacgcgcatccaccttctccgctttccagcccatacgtgcggcgttctgcgccatttcaaggccggatgtggcgacgccgccggcgttggctgctttgcccggcgcgaacagcacgccagcgtcgaggaacagatcggtggcggcaatggtggtgggcatgttggcgccttcggcaaccgctttaacgccattggcgatcagcatttgcgcggcatcgacgtccagttcgttctgggtcgcacacggcagcgcgatgtctaccggcactgaccacggctgctggccttcgagataggtcagaccgaattcgcgcgcgtagtcggcgacacgcccgtggctgcgctctttaatatcgatcaggcgggccagtttctctttggtgaagccggcttcgtctaccaccgtaccgttggagtcggaggcggtaatgacgcgtgcgccgaattccatggctttctcaatggcgaactgcgccacgttgccggagccggatactgcgacgcgcatcccttcgaagcccagaccgtggcgcttgagcatcgcttctgtaaagtaaaccagaccgtaaccggtggcctccgggcggatgagactgccgccgaaggagagacctttgccggtgaagacgcaggcgctgttgttggaaagcttgcgcatcatgccggccataaagccgacttcgcggccgccaacgccgatatcgcccgccggcacgtcggtgtccgggccgaggtgacgatacagttcagtcatcaaggcctggcagaagcgcatcacttcgccgtcgcttttacctttcgggtcgaaatcgctgccgcctttaccgccgcccatcggcagcgtggtgagggcatttttgaaggtctgttcgaagcccaggaacttaaggatcgacaggttgaccgaggggtggaagcgcatgccgcctttgtatgggccaatcgcggagttgaactgcacgcgccaggcgcggttaacctgcacctgattgcgatcgtcaacccagacgacgcggaactggatgacgcgctccggttcgaccaggcgttccagcaaattgagctgacgatagcgcggattttgttcaaggaacggccacagcgtggtcatcacctcgcggacggcttgagcgaattcagtttgatgcgggtcgcgctgttgaacgcgggcgagaaaactttccagagtacacgcctgatccatagatgtaatttccccttacggttgtggttgcttgttattttttatacccggccttgaaaatgccgtttttccgactataacaccggaaatagttaggctgacaaggaaaaaatgagcgcggagaaaaatttataatccgacaagggtcataactaaaaacgatgacccaggccggagatgggggagagaaactaacctgcctgttgagcgataaaggcattcagcagaggaatatccgccggcgccagatcaaattctaatgcttgcgacggcgtacaccagcgcagttcgctatggtaatgagcgaccggttcaccgctaaactcgccaatccaccaggcatgcaggtggatcaaacgcccggagacttcccgctgatggctggcgatatagcgggttggcctcgccacgattgccagctcctcttccagctcgcgggctaacgcctgcggctggctttcgccatgttcgactttgccgccggcgaattcccacagccccggctgatcggcatgcggcgggcgctgcgccagcaggattttgccgtcacgttcaataatggcggcgacgacatcaatcgttttttgcatagttatcctgaatcattcaaataccgggcttgcgtataatggcgtattatctccgtctttcccctgtcccgacaaccttttagcctgatggagagttaccgtgcttgatagccgcctgcatccccgattgaagcctgtactgaatgctatcgccggggtgctcgaccgtccggggatctcccctgatggcctgacgcttttcggttttgctatcggcgtgctggcgctgccatttctggcgctcggctggtacggcgctgcgctggtggccattgtgctgaaccggttgctggatggcctggatggcgcgctggcgcggcggcgtggtctcaccgacgccggcgggtttttggatatctcgctcgattttttgttttacgcgctggtgccgttcggttttattgttgccgacccggcgcaaaatgcgctggcgggcggctggctgctgtttgcgtttatcggcaccggcagcagtttcctggcgtttgcgaccctcgcggcaaagcatcagattgccaatccgggctatgcgcataaatcattttattatcttggcgggttgactgaaggaacggagacaatcctgctatttgtactgtgttgcctgtttccggcgcacttcacctggctggcgtggtgtttcggcgcgttatgctggctgacgaccttcacccgtatctggagcggctacctgacgctgagggaggcgcaaagccacaacctccctcagtaggcggattatttgctgctgtccgggccgcgttcgccggtggctaccggattttgcggattaccgctccattcgtaccagccgccgtcgtaaacggagacgtttttccagcccatcgctctggcgtacatgaaggtctccgaggcgcgccagcctgtgccacagtaaaacgagacctgctggtcaggcagaatgttccactgtttccacatcgccgcgatatcatcggcgctgcgcatggtgccgtccggattatggaagtcttccatatgggttgaatcgctgccggcatgaccccagcgcgcgccggcaatatcgcccttcggcttgatgtagctgtagccgctggtggcgccgataaattccggccacgaacggacgctgaccagcgacgcatcctggcggtgtagtaacccacgcgcctgttcggtatcgagcattaactgcggctgaccggggatcggcgcgccgaaatccgtcaccgctttttctttggctggcataccgcgttcgaccggcagattcgcctcggaccagcttttccagccgccgtcgagcaggcggacatctttcaccccggcatacagcatgatctgcgcgacgcgcgcggcggcgtagacgtcgcggccgtacagaatcaccgtggtgtcatggcgaataccgtgtttagccagcatcgcttttagctggtcatcagacactttgttccatagcggctcgctttccacttcattggtatcaatataaccggcgccgggaatgtgattcagcagataaaatttcggcgcgccccatgccacttcaaacagtttccagtcgccctgcggagcggcggtaacggttttaccttgttgtaaatcgtggatccattgcggatacaccaactgctcaaagtgcggcagtttctgcaggcgctcgctttgactgaaagcgtcgctaagggtgctgagcttcgtgaatccggcttctttcaggcgcgccgcgaccctggcgttatcgtcagcgccgccgtataacgcgattggcgtatcggcctgcagctggtgctgagtagcccaggcacgcagttgttcgtcgctcattgcgccaagccaggtagcggagaggtttagcgcctgcggttcatggccctgcgggccgttggcgctttgcggccaaccgttatagaaagcgctgaggcgggtgtctatcgctacgccgtgctgctgttgcagcgttgaaaagtccagcgttggcatggtgtcagcggcgaaagtagtggaagcagcaagccccatgagcagggcgagtgcggtcaattgagaaacacgtttcatcgaaatgcccgacggtagaaagaggagggctcattctctgctcctgataagggaatttctttgcgataacgcaggttaggcggaatttgcctgccaggcggcaatatttatacagcgtccgcccggcgggagatcctgactgtcatgagtcaccaggatcgccgggatcgccagccggtcaatttccgcaaacacccactggcgaaaatcggcgcggagttctgcatccaggcgattaaaaggttcatccagcagcagcgcttgtggcctcgccagcagggcgcgcagcaggctgacgcgcgcgcgctgtccgccggagagcgtggccggatcgcgcgaggagaagcccggcatgccggcgcgcgccagcgcttgctcaacttcgctctggcgcgccgcgccgcggatctcagcgggcagggcgagctgtaaattgtgccccacgctaaagtggtcaaacagtagcgcatcctgaaacaggatgccaatgcgccgcgcttcggtggcgagcccgtcgcagcggcgtgtgttgagccataattcaccttcggcgcgaaaggtgtcggcaagcgcgccgatcatccaggcgaaaagggttgatttaccgctgccggacgggcccatcagcgccaacacctcgccgggggcgacagaaaaatttaccctacacaacagcggttggcggtggagggttaatgtcaggttgtgaacggttagcattagcgtaatccccggcggcggcggcccataaaccaggccatcagcgcagtaaccataaagcagatcgccggtagcagcaattgccacagcgcttgggcggcaagccgcgtactgtcgccgccgctgctcagcgcgaccgcttcgctggtcaacgtcggcgtccgtccgccgccgagccacacggtcggcagatattgcgcaatactcactgaaaatccgaccgccagcgcggtgagcagcggtcgcgccattgacggcagtttgacccaccagaacaggcgtccgcgccgccagccaagcgtacgggcaatcaatagcaaccgtggatcaagattgcgccacgccggggagaggataaacagcatccatggtactacccataacagatgcccccataataccgttatcaattgaccgtcgagccagccggcgagcgctaattgatattgaccatcggcaagcggcagagtcgggatgattaatggcagccagagtccgttatatctggcgggaccaaactccagccatagcagacacagcgcggcccccagtatcgccgcgcctaacgccagccagaggctgttgccgatcgcctcagccgttggctgcgtccattgcgaaatgccagccaacaacaacgcgcaaaccagaccgcaggcgggtaccacctgcgccagaatatgtccggtcgcagcgttggcggggcggcgcgcttgccgcatagtgcgggaatagtttgccgccaacggcgccagcctgccgatgcgatggccgcgaagattaacgtgaacgccagcagcagcaggctggccaacgcacctttcgcctgttgcagcggatcgccctgattaagccactgccacgccaggaccgccagcgttggcggatttcccggaccgatcaccaaagcgatatccaccgccgacaaactccaggcgacggtggccagcagaacaaggctcatcgatggcagcagtgccggcacaataatccactgcagacattgccagcggttgtagccgagggttttcatcactacgctttgggccgccagctgtttttcacccagtacgccatacgccacccacagtaaaaaagcgctctctttgaccgccattgtcaggcccagcccgataccgtagcgatcggccgggggctcagcgcgggaaacagacgatacagccagccgccttcggcaaatagcagcagggcggcggtagcgaaagcgacatggggtaccgccagcagcagcggtaatcttctcgccaggcgctgccagccggcggctggccataacgcgccaatcaccgtcagggtgatgaactgcgcgccgaccaccgccagcagcgtagagactagcgtcgccgccagcgcctgcggcaactgcggatcgctaaatagcgcccgccaggccgcggcgtcgacggcaggtatcgccatcagcgcggcggcgggaagcagggggaggtagataagcgctatcgctccccacgtcagcgcaattagtgggtaccgtagcggcgcaaccattcctgctccagcgcgtcaacccaggcggcgtgcggttcagccagcatcggcggcgtcgcttttggttgcacggcgtaaaatgcggcgcgctgggcgtcgttgagtttttcgggatcgagtacgctgggatcgcccagaactgcggatcggctttgcgtagctgagcctgcggcgacagcaggaagttggcaaccacctgtgcgcccgccgtcgcgcgggcgttggcgggatagcgacaaaatgcacgttgccgagcatcccttgtttaaaaccgaagctataactgtcttgtggaagttcgccgctggcggctttttgctgcgcatgcagcggattgaaggtcagcgatagttgtagcgtgccttgcgccagcatcgcgtccatacgcgctggtgacagcggaaaatcgcgaccctggcgccagaggtggggtgtagcctggcgagataggcccatagcggcgcggtcaccgcggcgaaacttgccgcctgcggcggctggcgcagggcatccggccgatcggtcagcgcgatcagcagctgctcaagaaaagcggtgccggtaaaatccggcggccgcggataggtgacgctgcctggatgcgctgtggcgaaagccagtagcgcctgtgcgctgtccagggggcagagagctgcgatcggcgggcgataaaggtcagctgcgcgctgccccacggggattccgcgccgtcggtggtgagggagaaatcttcacgaaccggttttcgcgtatcgacgtagcgccagttgggcagcttttcagcccagtcgctgcgcagtaaattcgcctgcttcaacgtgcggaaattctcgccattaacccacaataaatcgattgaacctccgcgggaacgcccggcacgcgcctcggtctgaatacgcttgaccgcatcggcggcatcggcgatatgtacaatacgtagatcgacggcgtaatcgcgtttcacctcggcgctgacccagtcgaggtagcggttaaccgccgggtccccgcccaggcgttgaaccacaccgtctggccgcgcgcctgctggctgatgctctgccagttctcgtcggcgttggcgagagtcggggccagcagcagtgcggcaagccaaattaaacaataacgcagactgcgcatattgactccttagggatgagtgtcggaaacatcgggcttcgggatttggcacaggccctgcgccgggatcgccagcgcggaattaaagcgtgcggataaattttgcaggccgatcagcgcggttagctcggttaacgcctgggcatcaaactgctgggctagccgggcgcgcatcgcatcatcgacggcgggcggcgtcatgctcgccgcttcggcatattccagcgccaaccgttcgctatcgctgaataatccgctattgcgccagtcgttaaccgccaatagtttttcgctgccgcctgcgcgctgcgccagtttcatgctggtgatatcaatgcaaaattcacagtgacacagctgggcgatacgggcgctcaccaacgagcgtagcagcggatcgagcggcgagcgtcggcgttccagatatccgacaaacatggagaccagataaaacgccagcgggatgcgccccaccaacggatagggctgagcaccgcgccataatggcgacggtgtagccacgcctgcgggcgcaggatcaatggaatcgacgttaacggcggtagattcatggcgatttcctgttgtgatgcgcaacgtattgcgctttgactatcgcgactacgatagctaaagcgaacaaaatagataaaccgctgagcagccagaacagccccccgtcagcaggcttccggcccacgagtagacgatagtcgccggtaattggccgacgccggtggcaaacataaaatggcgaaagcggattgaggttagcccagcggcgtaactcaccggatcgaaaggaacgaagggcagcaggcggcaaaccaggatggtgtgcttgccgtagcgcctaaaaaaaccatctacgctctgtaataccgccttgccggttagtttttctaccacttcacggcccagtacgcgggcaataaaaaagcacaacgccgcgccagccatcgcgctgacccatgacaatacgccgccccacagtgcgccgaacagcgaagcgttggcaaaggtaattaaaaatgccggcagcggcgcgacaatcgcctgcaggatcatcagcccgaaagagaccagggccgccagcggaccataagcgtgaataaaacgctccagcgcttgctgatcgagggtggcaaacgcgctgaggctatgttgcacaaaggagcgtacgcccggtattaaccaccagccgacgagcgctgccagtgccagcaggatgatagcgccgcgtaagagccacagccgttttctgttatccatttttatcgcttaccgcggatgttgcgacactaatgcgtttatagcggccataacgcctggcggcctgagttaatacaaagagcatcaggccggcgatgctgagtttgccaataaaggccagggtgatgccatctcgggccagttcgctggccataaaagtataaataaacaatcccggtagggtggcgatggtggagataaacgcaaaggaccagaaggggatcgccgtcagcccataggcataattctgcagattataagggaacagcggcaccagcctggtgaaaatcagaaaatcgcagccgctgcgggcaataccgcgctcgaacgcctgaaaaacggcgtggtgaccgcaatagcgctgtagcacttcgcgacccagccagcgggccagcaggaacgacagcgatgaggcgacagtcgcggcgataagcgagagtagcgtgcccaaccaggggccgaatatcattccgccgacgataaccaacgcgctgcctggcatcagacacaaggtggcgatgataaacagcaggatataaagcgcataacctgcgttaccgctgtgtagaataaataattgaagatcgtgaaggtggctgaacagtctcgtcagcccggcgtgctgaacaagccatgccagcagggcaaacaggagtacggcaaacagcagtttatagcgtgtcgggtaacggcttcttttgcatgggggtctcctgtcttcgttttgcccggcaggaaacgccgggtgcgcgcgacagtatagtaaattgccgtgagcgacaatgtataccgttcactttattgattttgctcaggatagcggggctcagcgccggaaccccactgaagaattacggtttaaaggttgcccataccggcgcatgatcggaaggcttttccatcccgcgaatgtcgtagtcgatgccggtttcgacgcaacgctgagccagcggcgagcttgccagcagcaggtcgatacgcagaccgcggttgtcatcaaaacctttagagcggtaatcgaaccatgagaagcggtcatgattatccgggttggcgtgacgccaggtatcgaccaggccccagcccagcaggcgatccatccattcacgctcttccggcaggaaggaacatttaccggtgcgcagccagcgtttacggttctcttcgccgataccgatatcaaggtcggtagggctaatattcatatcgcccataataagcaccggattttctttgttcagctcggtatcgaggtagttctgcagattctgataaaacgccgcctttgccgggaacttggtctcgtggtcgcggctttcaccctgcgggaaatagccgttaatcaccgtaacattgccaaacggcgagggaatttccgccatgataatgcggcgctgcgcatcttcgccgtcgcccgggaagccgcggcgcacggctatcggggtctctttggtcagcagcgccacgccatagtggcctttttgcccgtggtaaaagacgttgtaacccagcttcgccacctcttcgagcggaaacatatcgtcgtgaactttggtttcctggagaccgataacatcgggctgatgtttatcgacgatggcggccagttgatggggcgggcacgcaggccgttgatattaaaagagatgaatttcatagtcgctgccactgtgcaaggtgaatagtgcaaggatgttagcagaatttcatcatggtggctgccggcaggtagctaattctaccgattactgcggttgtcgagctaatcgcacaaattatgcaccgttttagcgcatgtcgcgccaaaaaagcgcagatatctacgataaatttcgtagaggatcacaattacagaattatatcttatcgctgcataacttctcgtcgttttcctctatccagcgccgtttacttgatgattattcactaattatgcatttaaattgaataattagtgtttgtaactcgttgatatcacgtgattgagttcaatttatgcatttttgcctctggctggcacgatgcgtgcaatctacatttacagcgtaataactcataaattttaacattgtgcttacttttaatttaccggaagaggtcgatatgtctcagtcaattacgcgtagcaattttgatcaatggatgatgccggtatacgcgccggcggcttttattccggtacgcggcgaaggttcacggttgtgggatcagcaggggaaagagtatatcgattttgccggcggtatcgcggtgaatgcgctgggacacgctaacccacagctagtaaaagcgctgaccgagcaggcgggaaaattctggcataccggtaacggctacaccaatgaaccggcgctgcgccttgccaaacaactgatcgacgccacctttgccgaccgcgttttcttctgtaactccggcgccgaagccaacgaagcggcgctgaaactggcgcgtaaatacgcccacgatcattacggcagccacaaaagcggcattgtcgcgttcaaaaacgccttccacggacgcacgttgttcaccgtatccgcaggtggccagccttcctattcgcaggattttgcgccgctaccgccgcagatccaacatgctacctacaacgacctcgactcggcgcgtgcgctgattaatgacgacacctgcgcggtgatcgtcgagccgatgcagggcgagggcggcgtggtgccggcgaaagcggaatttttgcacggcctgcgtgaactgtgcgaccagcacaatgcgctactgatttttgatgaggttcaaaccggcgtcggtcgtaccggcgaattgtatgcctatatgcactacggggtgacgccggatgtcctgtcgacggcgaaagcgctgggcggcggcttcccgatcggcgcgctgttggcgacggagaaatgcgccagcgtgatgaccgtcggcactcatggcacgacctacggcggtaacccactcgccaccgctgttgccggggaactgctgtccatcgtcaataccccggcgcttttgaacggcgttaaacagcgtcaccagtggtttagcgaacgcctgagcgcgattaacgccagatacggcctgttcaaggaaattcgcggattggggctgctgattggctgtgtactgaacgacgaatatgccggaaaagcaaaagccattagtacccaggcggcggaagacgggctgatggtactgattgccggggcaaacgtcgttcgtttcgcaccggcccttaacgtgagcgaggaagaggttaacaccggtctcgatcgctttgagctggcctgccgccacttccttgcgggagtttcatcatgatggtgatccgaccggttgaaaaagccgatttgccgggattgatggtcctggcgagggaaaccggcggtggcctgacgtcgctaccggcggacgaacccacgctggctgcccgcattgaacgctcccagcgaacctggcgcggtgaactgccgaaaagcgagcagggctatgtctttgtgctggaagatagcgtcagcggcgcggtcgttgggatctgcgcgattgaagtcgccgttggcctcagcgatccctggtacaactatcgggtcggcacccaggttcatgcttcaaaagagcttaatgtttatcacgcactgccgacgctgttccttagcaacgatcacaccggctgtagcgaactctgcacgctgtttctcgatccggcatggcgtaaagagggcaatggctacctgttgtcgaaatcgcgcctgctgtttatggccggtttccgcgaccactttaatgacaaagtggttgccgagatgcgcggcgtgattgatgagcatggctactcgccgttctgggaaagcctcggcaagcgcttcttcgcgattgaattttcccgcgccgactatctctctggcactggtaaaaaagcgtttatcgccgcattaatgccaaaacatccgttatatatcgactttctttccgatgaagcgcgggcggtaatcggccaggttcatccgcaaacggcgcctgcgcgtgcggtactggaaaaagaaggcttccgttttcaaaactacatcgacatttttgacggcggcccgacgctggagtgcgaaattgaccgagtgcgggcgatacgcaaaagccgcctgttgacggtggaggaagggcagcctgcgccgggagagtggccgcagtgtctggtcaccaacgagcagtatcagcagttccgcgccatcctggtccatgccgacccggatagcgaaacgttgctgctgagcgcgcgtgagctggatacgctgaaatgccatccaggcgaccgcgtacggatggtccgcctgatcccggaggagaaagcatcatgagtttatggattaacggcgaatggcaaagcgggcgcggcccgcagcgcagtaaatataacccggtcaaccaggcgctgctgtggcaggggaatgacgccgatgccgggcaggtcgcgcaggcggttagcgccgcgcgtcaggccttccccacctgggcgcgtcagccatttagcgcgcgtcaggcaatcgtcgagaagtttgcggcactgctggaagcgaacaaaagccagctgacggcgattattgccgccgagaccggtaaaccacgctgggaggcggccacggaaattaccgccatgataaataaggtggcgatctcggtgcgcgcttaccatagccgcactggcgagagcgagacggcgatggccgacggggccgccacgctgcgccaccgcccacatggggtactggcggtgttcgggccgtataatttccccggccatttacctaacggacatatcgtgccggcgctactcgccggtaacactgtcgtctttaagcccagcgagcttacgccgcaaagtggcgaagcggtggttaagttgtgggctgaggcgggcttacccgctggagtcgtgaatctactgcagggggccgggagaccggcgagtcgctgagcgggcaggcggatatcgacggactgttgttcaccggtagctccgcgaccggcttccaactgcaccgacaactggccgggcagccgcaaaaaatccttgccctcgaaatgggcggcaacaacccgttgattgttgacgaaccgcaggatattgacgctgcggtccacctgacaatccagtcggcatttatcaccgccgggcagcgctgcacctgcgcgcgccgtctgttggtaaagcgcggcgcggcgggcgatgcgtttttgcagcgtttagtgacggtgtcacaacgtcttattcccgacgagtgggatgcgcagccgcagccgttcatgggcggactggtttcgccgcaggccgcgcaaaaggtgcatcaggcctggcttgggcacgtggcgagcggcggacagacgttacttgagccgcgtctgctgcgcgagggcacctcgctgctgacgccggggatcattgaaatgaccgacgtggattcagtggaggatgaagaagtctttggcccgctgttgtgcgtgtggcgctatgacgatttcccgcaggcaatcgcgatggctaacgccacccgttttggtctttcctgcggactgatttccgccgagcgcgataaattcgagcgcctgttgctggaggcccgcgccgggatagtcaactggaacaagccgctgaccggcgccgccagtaccgcgccgtttggtggaaccggcgcctcgggaaatcatcgtcctggcgcatggtacgccgccgattattgcgcctggccgatggctagtctggaatctgccgaactggcgctaccggagacgctcagtccgggtctggatttttcatcgcaggcaagttgatgaaagttcgcggggccgggattctcggccctgcgagttttcctcgatccgtttcagtaatagaggaggcgtagtggacgactttctggcactaactctggccgggcgctggccgcatcattttcatggcgaaaccgcccattttcgttggcactggatcgattgcggcatcctgctgctgacccgcatgcgcgctgcgaacgttcactggtactctcctgcggtattcacggcaatgaaaccgcgccggtggagatagtcaacgctttgcttcagcagttgtttagcggcgaactcccgctgcgctggcgtgtgttggtgatattcggcaacccgccggcgctgcggcaaaataaacgctatctcgatagcgatatgaaccgcatgttcggcgaacgctggcgcaagttcgcgcccagtggggaaacggtgcgggcgcggcagttggaaagcgctgtgacgcgtttctttagcgatagccatggcgtgcgctggcatctggatatgcataccgctattcgcggctcgctgcatccgcgctttggggtgttgccggcacgcgaggagccgtggagcgaagattttctcagctggcttggcgcggccgggctggaggcgctggtgttccatcaacaaccggcgggaacctttacccactttagctgcgaacgttttgccgcgctggcctgtacgctggagttgggcaaagcgctgccttttggcgacaacgatttaacccagttctcagcgacgcagcgggcgttaagcaggctgttggtgggcgatttggcggtggaagaagcgactgcgccgctgcgctaccgagtggtgcagcagatcacccgccacagtgaccagttccagttgcatatgtcgggggagacgctcaattttacgccgttcagcgccgggacgctgctggcggaggatggcgaaacgcgctatgtcgtcgaaaaggcgcaagagtacgtgttgtttcccaacccggcgtggcgccagggctacgggctgggctgatgctggaaaggttataatttccgttgttaactattcacagccgttgtcgttcgcggttgtgaatatcgagcgaaatatggctgcgctccgatcttatttatttgtgtcattaatatggtttgcagattattcctggttaaatgctttgtttttaatctccactgttttataatcttcatagtttccttataaaacagccttttatttattttttgttgcatatccctcctcattttccttattttctccacaattggtgagaaaatgttttttacactttcattgttttacgcttgcactgactaattgacgataaagcgcgtaaagttaatctcgtcaacacggcaatgcgccgtcagaataactgatagtaaggacataaccatgaagaagattactgctctgtttgttgcctctacgctggctctgggtgctgctaacctggctcacgcagccgatactaccgctaccacccaaaccgacagcaaaccgatgatgcaccataaaggtatgccgggtcatcacgatatgatgttcaaagacctgaacctgaccgatgcgcaaaagcagcaggttcgtgacatcatgaaaagccaacgccagaacatgaaacgtccgtcccttgacgaacgtcgcgccatgcacgatctgatcgccagcgatactttcgacaaagcgaaagccagcgcgcagattgataaaatggaagcacagcataaagagatgatgctttcccgcatggaaacccagaacaagatttacaacattctgacgccggaacagaaaaaacagttcaatgcgaattttgagaagcatctgacagaacgtaaagcgccggaaggtaaaatgcctgcacctgctgagtaactcagcgcgcggaacgaagaccgccggtcttgcccaatcattgccattaaggctttgggcagggccggcggttttttacgtttgcgatatcattagccaagcgggtgcagcggatactcaccgctgagcaatggcttacaaaggatcttgtagccatcgtgatcgaaaccggcaggcaatgtggtgagttcagcggcttgcgccagtgaatccaccgcgcccagccacagccagttatgaatgatgtggtactgaaccatatccgggctgcgctcctccagcgccaccggacccgcccacggccagcacaccagctgaagcttactcatctgcgccagcagccgctgattatgatcttcgacgcgctctttaccgcagcaggcgcccgcgcagcgccccagcgcggaacgaaaacaggcgcgcccgcgactcagcggctccagccccagaatgccgtaacatagatggtgttcatcagcgatagtttgcagcgcctgtaatgccgcgcggcggttagcgaacaggccgtacaggtgctgctgatgggagaaatcgacttctcgcgcatatacaatttgcggtttacccgcctccagcagccaggagcagagctgtttattacgccgcagtcgtttattaaacagcggctgctgttctttaattaaccgcgcttcaagcaacagcgcgcctaattcaccggcggtgcgttgccaactgatgcgtcgcgcctgtcgcaacatggaggcctcatctgcggtacgcaaatgcgacagtacccggctgcggatattcacgctctttccgatataaagcggtaacgtttcactttcaccatgaaactgatataccccggcaactttggcaaggcctccagccatgggcgcaaatgttcgggatactcatagattgccgccgcctcgaattccagacgcggggatgattgctttctggccacaacaactcctggtactgtttatgcatccagtatagcaggcgaattttgcggcgaaaaggacaaaaaataaccccggcgctggccggggtgtcgggaagccgttacttcttccagaaatcgtcgaagacggtgattggcgggcggcgcttatgctcggttttcagataccagccttcaatggttttggcgatgttctcatccagcgttttgccttccagatagtcatcaatattttcgtaggtcacacccagcgcgacttcatccggcagagaagggcggtcatcttcgaggtcggcggtcggctgcttcatataaaggtgctcaggacagcccagctgcgccagtagctgtttgccctgacgtttattgagacggaagatagggttaatatcggtgccgccatcgccgtatttggtaaagaagccggtgatcgcttctgcggcatggtctgttcccactaccacgcctttggtcatgccggcgatactgtattgcgctttcattcgctcacgggctttctcgttgccgcgaacaaagtcgctcagctcaatacccgcctctcgcaacgcctgctcgctggccagcaccgcgcctttgatattgacggtcagcacacggtcaggctggataaattcgatggcatcctggcaatcctgctcatcggcctggatgccataaggcaggcgcacggcgataaattgcaggctccgatcgccgctttcagcccgcagctcatcgatcgccatctggcatagtttgccggtaagggtcgaatcctggccgccgctaatgccgagcaccagtgatttaatgaacggataggtctgcagataggatttcaggaaatccacgctgcggcgaatttcgccttcgacatcaatctgcggcttcgcgcccagcgcctgaataatttgttgttgaagcgtcattacgccctccggaaagtgagcctgtatggcaaccagcatggtctaaaactacctctttgctgccgaaacgacaaggctggtaccgctgactgacggaaaagaaggcaaccaatggcatagcatttatttatggtgcgggaaaacatcggtagtggagtacgttccgtcgctgtttttttgcacatatctggttaccagaaaagttctgaatttacatgaattcgacgtttggcttgaaaaataacgctttttattccaggcttaaaacacgccgattacataatgaggacggaatatgaacaaaaattagcaggattgatgggcgcagcagcagtattaaccatgctggcagggtgtacggcctatgaccgcaccaaagaccagttcacacagccagttgttaaggatgtcaaaaaaggcatgacccgcagccaggttatgcagattgccggtaaaccgtcgtctgaagtcaccatgatccacgcgcgcggaacctgccagacttatatcctgggtcaacgggatggtaaaattgaaacctactttgtcgcgctggacgagaccggtcacgtgatgaactccggctaccagacctgcgccgagtacgacaccgatccacgtaatagcaaataactacgcgtcacaagctgagagctacgaaagcccgaccattggtcgggctttttaatggcctctaatgcttatttaattgcgcgaattatttgggggaaatgtgaggatagtcaaaatgcgaggtcaatgagagacaattctgttcaacagggaattatcctgccgtcaaatgttgccgtatactcaatgcataaacaaaactaaccgaaagtcaccagtcttaccggctctcagccattgctgaagcccaggtcctacacattgaggaagcgttcatggaaaagaaacatatctatctgttctgctcggctggcatgtccacttcattactggtctccaaaatgcgcgcccaggcggaaaagtatgaagtcccggtaattattgaagcgtatcctgaaacgctggccggtgaaaaaggaccggaagctgatgtcgtattattaggaccccaaatcgcttatatgctgccggaaattcaacgtctgctgccaaacaagccggtagaggtaatcgattccattctgtacggtaaagtcgatggtttaggtgtattgaaggcggccgtcgcggccattaagaaagctgcagcacaataattttattttttaaactcgcgatattttggcgtctggtggttaattaatactagccgccactatattcaacagtttattttcccgtcaaagagtaatttcatacatcatcgccgtaatattttattgcggcttttaagggtattgactatgagtaaagtgatcgattcgcttgaaaaggtactccttccttttgcagttaaaataggaaagcaaccgcacattaatgcgattaaaaacggctttattaaattaatgccgttgacccttgccggggccatgttcgtattaatcaacaacgtttttctgagctttggtgaaggttctttcttttattcaatggggattcgcctggatgcctccaccattgaaaccttaaacggctttaaagccatcggcggtaatgtttacaacggtacattgggcattatgtcgctgatggcgccgttctttatcggcgccgcgctggccgaagagcgtaaagtcgatcccatggcagctggtctgctggcggtcgccgcctttatgaccgtcacaccttatagcgtgggtgaagcctacgccgtcggcgccaactggctcggcgggcagaacatcatctccgggatgattatcggcctggtggtggcggaactgttcacctttgtcattcgtcgcaactgggtcatcaaactgccggatagcgtgccgtcatcagtatcgcgttctttctcggcgctgatcccgggcttcctgattttgtcggtcttcggcattatttcgtggattctgtcaaactacggcagcaacttccatcagatcatcatggactccatctccacgccgctggcggcgatgggcagcgtcgttggctgggcgtacgttatctttaactccctgctgtggttctttggggtgcacggttcgctggcgctgaccgcgctggataacggcattatgacgccgtgggcgctggaaaacatcgcgctgtataaccagtatggttctgtcgacgcggccatcgaagccggcaaacagttccacttctgggcgaagccgatgctcgactcctacatcctgctgggtggttccggtgcgacgctgggtctgattatcgccatcttcatcgcttctcgccgcgccgatcatcgtcaggtcgctaagctggcgctgccttcaggcatcttccagattaacgaaccaattctgttcggtctgccgatcatcatgaacccggtcatgttcatcccgttcgtgctggtacaaccgattctggcggcgattacgctggccgcttacagcctgggcattatcccaccggtgaccaacctggcgccgtggacgatgccaaccggtttgggtgccttctttaacagtaacggtagcgttgctgccctgttggtcgcgctcttcaacctttgtgtcgctactgccgtgtacctgccgttcgtcatcctgtcgaacaaagcgcagagcaccatcgagcaggaagaaagcgaagaagatattgctaacgcactgaaattctgatgtcgagcggtacgggctctccccgtaccgcctgagaaacgagggaaatattatgtttgatctggataacatcgacgcggtagaaaccccggaaaatgacctcgaagaggtggtgatggggctgattatcaactccggacaggcgcgtagcctggcctatgcggcgctgaagcaggcgaagcagggagattttgccgccgcgaaatcgatgatggagcaatcgcggatggcgctgagtgaagcgcatcgcgtccagacccagcttattgaaagcgatgaaggcgagggcaagatgaaggtcagtctggtgctggttcatgcgcaggatcatctgatgacctcaatgctggcccgtgaactggtggccgaattgatcgagctgcacgagaaggtacaataggctatccgaacgatgaggcagccgaaaatgatgaccacagagatcagtaccgccagggaacaacaactcttcaacgggaaaaactttcatgtggtcatctataacaaaacggagagcgtgagcgggcttcaccagcatgattactacgagttcactatcgttttaaccgggcgctattatcaggaaattaatggcaaacgggtgctgctggagcgcggggactttgtcttcatcccaatggggtcgcaccatcagagcttttatgagtttggtgcgacgcgcattcttaacgttggcatcagcagacgcttctttgagaaacattatctgccgctgctgccgttcgggctggtcgcctctcaggtctatgcggtgcaaaatgcctttctcagttatatcgagtcggttattgcttcactgaattttcgtgagactgaatttgacgaatttattgaactggtctcgttttacactattaatcgcttacgtcattatcgtgaagagcccgttgaagatgtgattcctcactggctgaaaaataccgtagaggatatgcacgataaaaataaatttggcgaaagtgcgctggaaaatatggtgcaattgtccgggaagacgcaagagtatttaacccgggcgacccagcgctattatggtaagacgccgatgcagatcattaatgatatccgcatcaatttcgcgaaaaaacagctggaaatcaccaactattcggtcactgatattgcgtatgaatcaggatatagcagcccaagtctgtttattaaaactttcaaaaggctgacctcatttacgccaagcagttatcgcaaacagctgaccaatattaattaactcgcagcggtatttaccgcgcggtttattcattcaaattaactgtccgcatttatgcggagagcgggctacgtgtacgcgtagcgccaaagggagagagatatgagccagaaattaaaagtcgtgactattggcggcggcagcagctataccccggaattactggaaggtttcctcaaacgctatcacgagctgccggtaacggaactgtggctggtggacgtggaagaagggcaggagaagctcgatatcatccatgcgctgtgccaacggatggtggaaaaagccggcgtgccgatgaaagtctataaaacgctggatcgccgcgcggccctggaaggggcggatttcgtcaccacgcagctgcgcgttggtcaactgaaagcgcgtgaaaaagatgaacgtatcccgctaagccatggctatcttggccaggaaaccaacggtgcgggcggtctgtttaaaggtctgcgtaccatcccggtgattttcgatatcgtcaaagatgtacaggaaatttgccccgatgcgtggatcattaactttaccaacccggcgggtatggtcaccgaggcggtataccgccatacaaatttcaaacgctttatcggcgtgtgcaacattccaatcggtatgaaaatgtttattaccgatgtgctgcaactgagcccgagcgatgagttaaatatcgatctgttcggtctcaaccacctggtgttcgttcgcgatgtgctggtcaatggcgtgtcgcgcttcgatgaactgctggacggtgtggcttctggccgtctgaccgcgaactcggtgaaaaatatcttcgacctgccgtttagcgaagggttgattcgctcactgcgcctgatcccatgctcgtatctgctttattacttcaagccgaaagagatgctggcgattgagatgggcgagtactacaaaggcggcgcgcgcgctcaggtagtacagaaggttgaaaagcagctgttcgaactgtacaaaaatccggatctgaacattaagccgaaggagcttgagcagcgaggcggcgcttactactctgatgccgcctgcgaggtgattaacgccatttacaatgataagcaggccgagcactatgtgaatattccgcatcatggccatgttgataatattccagccgactgggcggtagaaatgacatgtacgctgggccgcgacggcgcgaaacccacgccgcgaatcacgcattttgatgaaaaagtgctggggctgatttataccatcaaaggctttgaagtggcggccagccaggcggcaattagcggcgagctcaatgatgtgctgctggcgctcaatttaagcccgctgattcattcggatcgtgatgccgagcagctggcgcgggagatgatcctcgcccatgagaagtggctgccgaactttgcagcgactatcgaaaaactgaaacagtaacgggagtggccgatggaacgcgtattgatcgttaacgccgatgattatggcctgagcaaagggcagaattacggcattatcgaagcctgcaagaatggactggtgacgtcgaccacggcgttggtcaacggcgcggctatcggccacgccgcccagttgagtcgcagcctgcctgagctggcggtgggcatgcactttgtgttgacgttgggcgagccattatcggcgatgccggggttaacccgcgacgggcggttgggcaaatggatttggcagatggcggaagaggacagcctgccgctggatgagatcgcccacgaactggagtgtcagtaccggcgttttatcgaactgtttggttgtgaaccgacgcacatcgacagccaccaccatgtgcatatgatcgcgcagatctaccccatcgtcgccgcctttgcgcgcgaaaagggcgtcgctttgcgtatcgatcgtcaggtggcggcgctgaatggtctcgaccaggatgcggcgcgcagtagcgatggcttcagcagcgaattttacggtgaagcggtttcacaagcgctattcctgcagacgctggatgcgtcgattgaacggcaggaaaactcgctcgaagtgatgtgtcatccggcatttgtcgataacaccattatgggcagcgcttactgctatccgcggctgaccgaactggacgtgctgacgtccggcgagctgaaatacgcgatcgcagaacgcggctaccggctgggaaactatcgcgacgtataaagagaggaaaaaagcccggcagccataaactgccgggctttttgttacgcgggtatggccgcaattttactgcttctagaccagacgcgatgcgcggccagtagcgtcagcagtttatcgacgctaagcgtattaatcgcgtcgcattcgatgaccccttcttcacccgcagagggcacctgtagcagcgaactaaactgccgcgcatcgcccgccagtaaaatgggcttcagatgcttataggcttccagcagatagtagcgtgcatcgccgttatcgctgatgctggtcaggtcgccgccgggaacgataaccgcatcaaccgtcaacgacggcgatccggcgaaggttccggcgatcggtagctgcgatccatcatcggcgctgacttcgcccatacgagaatagagcagtttgctgtgaacgcccctggcctggagcgcctgcagcaggttgagtacatcctgcgcgcaggtcttttcgttgagtaataccgcgacaattcgtccttttacgtcgccatcgccatcggcgtaaagactgagggtaggatctttctccacgccgttaaccggcgcaggaggcgctatattacgctgctcatcgctcagttcgatgccgagattgttggctaccgcttccgccagcccgatatcaatatgcgccagatgatcgaccacccgctcgcggatccagactctgaccactttgctcagctcaaaactaaagccgccgataatgtgctgctgctcaatcggcgtctggctgagccagaacaggcgaggatgggcgtagtactcgccaaacgagggactgcggttacggattttctcgccatcaacgcgttccgccagcgattcaaagccgccgcgtttcggcgccggcggcgtttcacgaggccagttatcgttgatagagtttggttcatagtttgccggattggtatcaatctccattcggtgcatgccgtcacgctggaaattatgatacgggcaggtagggcggttaattggaatttcgtggaaatttggcccgccgaggcggctaatttgcgtatcggtataagagaagagtcgcccttgtaacaacgggtcgttactaaaatcgatacccggcacaatatgacccggatggaatgccgcctgttcgttctctgcgaagaagttgtcggggttacggttaagcaccattttgccgactcgttgaacgggcaccagcgcttccggaatgagtttggtcggatccagcagatcgaagtcgaaattgaactcgttttcctccggaattaactgcaggccgagctcaaattccggaaaatcaccagcctcgatggcttcccacagatcgcggcgatggaagtccggatcgcggccggtcaatttctgcgcctcatcccacaccagtgatgctttaccggccaccggcttccagtggaagcgcacaaaggtggctttgccttcagcgttaatcaggcggaaggtatgaataccgaagccttccatcgtgcgatagctgcgcggcaagccgcggtctgacatggcccacatgacgttatgcagcgtttccggctgtagcgaaacgtaatcccagaaggtgtcatgggcgctttgtccctgcgggattgcccagtgcggttcgggtttcaccgcatgaacaaagtcgggaaatttaatcgcatcctggataaagaaaattggcgtgttgttgcccaccaggtcgaaaatgccctcttcagtatagaatttggtggcgaagccgcggatatcgcgcacggtatcggccgaacccgcgccgccctgaacggtggagaagcggacaaaaacaggggtgattttttccggcgcggacagaaaatcggctttggtaatctctttcaggcttttgtaaggctggaaatagccgtgtgcggcggaaccgcgagcatgaacgatacgctcgggaatgcgttcatggtcaaaatgggtaattttctcacgtaagataaaatcttccagcaacgttggcccgcggttaccggcgcgtaatgagttttgatcgtcggcgatgcgtacccctgattggtggtcagcggaaagttttcacccctttacgctgcggctcgagggtatctaatttaatgctgtgggtatccggcgctttcaggctgccgggcgccgtcggctcctccccgggcgcggttggctggggagtagggcgccactcgcggtcttctggcgccagtgaatcgaggcccggttttgcttcatcgctatcgtgtaccggagcctgtcggctgtgtgggtcgtggtgcttttctgacatctgctcgtctcctgctttcattgctaaaagtggtcgttgctaaaccaaaacccttctaactatagaacattgtgctgaggatgctgctcaggcaggaatagagttatcctaaaatgcgcatcgtgccaggaggggcgacgaaaagggggcaatcggctatgataggggtttatgttcccgctttgcttagtgaatccatctgttatgaaatcattgcgccaacaaaatcgccctatcattagctacgtgccgcgcgtcgagcctgcgccgccggatcatgccgttaaaatggaccattttcgcgatgtctggatattgcggggcaaatatgtcgcctttgtactgatgggcgagcgtttccgccgctcgccggcgttcaccgtgccggaatcggcgcagcgctgggctaatcagattcgccaggaaggtgaaatagaggcatgacctcataggaaaataaaaaagccgctgaaattcagcggcttttttgtggctattaacgttagcgatgcgccagttcagcgtcttcttcgctatcgaggatggctttatccgtctggcgcagccactgactggtcagcgtgccggcggtcattgaaccgttaacgttgagggcggtacggcccatatcaatcagcggctcgacggaaatcagcagtgcgaccagcgtgaccggcagacccatcgccggcagcacgatcaaggccgcgaaggtggcgccgccgccaacgccggctacgccagcggagctcacggtgacgatacccacgagggtggcaatccacattggatccagcgggttgatgccaacggttggcgcgaccattaccgccagcattgccggatagataccggcacagccgttctgaccaatcgtcgcgccgaatgaggcggagaagctggcaatggattccggtacgcccagacggcgcgtctgcgcttccacgttcagcggaatagaagccgcgctggaacggctggtgaaggcgaaggtaatcaccggccagactttacggaaatacttcagcggactgacgccattgacggctaacagcagaccgtgcaccacaaacatgatccccagcgcgatgtaagaagccactacgaaaccgccgagcttgatgatgtcgtgcaggttggaaccggcaaccactttggtcatcagcgccagcacgccgtacggagttaactgcatcaccagacgcaccagcttcatcacccagccctgcagcgtgtcgatggcggtcaggacgcgttggcctttctccacatcgtctttcagcagcttcagcgccgcgacgccaaggaacgccgagaagataacaatgctgatgatagaagtcgggttagcgccggtcagatcggcaaacgggtttttcggcacaaacgacaggatcagctgcggaacgctcagatctgatactttaccgacatagttgctctggatggcgttcagacgggcggtttccgcgctgccctgcaccaggccttcagcggtgaggccaaacaggttggttaccaacacgccgaccagcgcggcgataagggtggtgaacaacagcgtaccgatgctcaggaaactgattttacccagctgtgaggcattgtgcaggcgcgccaccgcgctcagaatagaggcgaagaccagcggcataacgatcatctgcagcagttgcacatagccgttaccgacgatattgaaccactgaatagaatctttcagaacctggctgtcggagccgtaaaccagctgcaggccgagaccaaagataacgccgataacgagaccgaccagtacttttttagcgaggctccactgtttgtggcgggtttgagccagcgcaaacagtaaaaccgcgaacacgacaacgttcgctattaatggaaaattcatccccgttctcctgatatcttgttacctgggttggtctgaaaccaactcttatggcgccaagagtagcagaaggccttattgctttcttatactcaaatggaatgggttataaccaaaaaatcatttagcatatttatcgttcagcctgatggttaataaagcgattaaaggttatttgcagcgaattaatcatatttgatgaccagcgcacggcgctattttcggccatgctttgcggcatccagacggcgtaaatgaacagcgccatgcacagcgcgcgctcgagctgattgcctttgcgcggtgcgaggatcggcaggcggaaccgccagcggcaaggccacagcagcggtacgccggccggggtgagcatatcggcgagtatatggctgaggtagccaagcactaaaccctgcagcgcatccgccgggataatccagctctccggtacttttaggtagaacagcgccagcgcgccgaataccgccagtagactgtgggtaaaaccacgatggccgaaggcgcgggctaccggtttggagacccagcttaaacgctgcccgaggaaagatttcggatggtcgatatcgggcagcaggcaggtcagcacggcggaaggaacgatatgccaccagtccccctgcgccagcacgggggttaattctgcattttttgcaaataccgcacaggcgatagaaaagaagaggtggccttccgccgtcatgataaaaaccctaaactgtcaattcatacagtatagggtttttatacagtatacggaagaggtgacggtgtaactctttgtcacaaggttgacatattttgacggcactaatgcctgcgcaggtcgcttagccgcgcaggtctgctaccgtcagctgctgcagagacgccagtttcacatcggccagtacaaaacgcggatcgcggctgttttctgcttccggaacgacaatcgagcgcattcgcgccgctttgctggcgatcatgccgttaacagaatcctccagcgccacgcaggacatcggtgcgatgccaagcttagcggcgcaatcgagatagacctgggggtgcggtttgctgtatggcagatgttcggcggaagcaagcgcatcaaactggtcgcgcagttcaaacatttccagcactttttccagcatatgcagcggcgacgccgaggcgagaccgatcttaagtccctgggctttacacagcgccacggcttcacgcacgcccggcagcaacggccgcgactcctcgaccaactgaatggcgcggcggataatgctggcggttacctctgcgcggtccggaccgcgccagggctgttgcgcaaaccacaaatcgaccaccaggtcgatgcgcagccccagcaggtccggcaattcatcacggcggctaatatccactccgaggctttccagtacctccaactctgcgcggtcccatagcggctctgaatcgataagcaggccatccatatcgaaaatagcggcaagaatctggcgcttcgctgacataagttcctctccattggcgtaagtagataacgaaattgtccatatggtatatcataccgcgctgaagcaggcgaaattcgctgacgaagatagacttatacctgactctatggcggcatggagagtctggcgttttaaacaaggggaactcatgacgtatcaacaagctggacgcattgcggtcattaaacgcattttgggatgggtcatcttcattccagccgtgctgtctacgctgatttccgtactgaaatttatgtacgagcatagcgaaaagaaaccgggtattgatgcggtgatgatggatttcgcccacctgatgattgagatggtgcgttttaatacgccgttcctgaatttcttctggtacaactcgccgctgccggagttcaaacatgcgttgaacatcggtttctggattatctacgcgctggtgtttgttggcatggcgttgcaggcttccggcgcgcggatggcccgccaggcgaagtttctacgcgaaggggtggaagatcagttgattctggaacaggctaaaggagcggaaggcctgtctcgtgaacagcttgccgcacgtattgtcgtaccgcgtcataccatcctgaagcagtatttcacgctctacgtgctgccgattgtggtgattgtgattggctatgttttcttctcactgcttggcttcttgtaaatagacaaacggcccgggtaaccgggccatttatcattcggcaggcagcgctcgcggcttgccttcattgtctaccgccacataaataaacagggcttccgttgccttataacgctggcccagcggttccgtcgatacttttttcacccatacctcaatattaatggtgattgaggtgttaccgcgttttacgcagcgggcatagcagcacacgacatcgccaacggcgaccgggcgtaaaaaagtcataccatcaacacggacggtcacaacgcggccgcgggcaatctctttggccataatcgcgccgccgatatccatctgcgacatcagccagccgccaaaaatatcaccgttcgcgttggtatccgccggcatggccagggtgcgtaaaaccaattcgcccttcggggcgagatctgttgttgtcattctatactctgtactagtcaaagaagatcaggcgcgatgctactatgaaaacggcgcagagagaataggggaatacgcctgtcgatacggttaaaacgggtttttggcaaaggtcgggacgcgagttgataatagaaggcggtacgcgctggctagcgcgtaccgttgagaggaattagtgcttatcgtcctgcggcatgtggcggtagatataaacgccgctcaacagggtaaagaccagggtcaatgctgttaaaccgaatactttgaagttgacccagatattctgcggcagccagaacgcgatgtagatattggccagtccgcagagaataaagaacagcgcccaggccagattcagccgcgaccaaacctgctgcggcagcgtcagctctttaccaagcatgcgttggatcagcggctttttcattacccactggctgaatagcagagcgccggcaaacagggcgtagatgacggtcactttccacttaataaattcatcgttgtggaagaagatagtcagaccgccgaatacggcgaccagcacaaaagtgatcaacgccatcttttcaactttacgatagcgcacccagctataaatgaggaccaccgcggtggcgacgatcagcgcggtggttgcggcgtagatatcgtaaatcttataaaaagcgaagaagactacgagcggtaaaaaatcgagaaactgcttcatacatcaattccgtcgttcaggaagggccggaatgcccggcccagattaaagttagttgcgaataagcatatacaagcggaacaaatagatcagcaacagcgcagagaacagattgctgatggtattaatgaccacggcggcgacgtttggcgaaagcgttgcaaagcttgaagcaagcagcagcagcgccgtttttgccagcagccagccgagtaccgctggcgccaccaggcgcatatttgcccatgccagacgcatactgccgcgcattgcgctaaagatgccgattttatcctgcaccagcatcaccggcgcgaacgccaggacaatcgccagcagcacgcccggcaccagcaccagcatcatccccatctgtaccacgaaggtggtgaacaggataagcagcaacaacttcggcagaaccggcgccgccgcgccgattgcccgcagcgcgctgacgcgatgtccggcggagatcagctggatcagcaacagtacgccgccgaccaggatggcattccccaccaggcccgagaaggttgaggctgccgacgcgcgcagcaggatctgctgctgttccggcgtcatgttctgcaccagctcaaacaagccggcgctgcccgccaggttatcgccctcgctgaggatcgataactgttcgtcactgggcgaaaaggcatgaccaatgactaccgtgatgaacgcgcataacaacgcaatcagcagaatagtaacgaactgattacgaaaaaaattccccgtgtcacggtagacggacttcgccgtgatagacatgcattctccttgagtcttgcaggtgttttaactagccggggattgtaccgcaaaacgtggttgggtagcagtctctgccgctgtcacggtaagtatatctttgtaaagagttcccagcggcggcaggccgtagcgggcacgggcgcgatcgcacgcttcgttgagttcgccaccttcgcctgacatggcaaactcgcggcaggggaaggccgctgatgatagatagtgcagtgtaccgattcgccgatttcaccgcttaaggcggtacagcggctttgccgctgattggtaccgctcatgcagcgcagaaaaggggtaaggggttcggtgagctgcgtaggcaccacgccgccggcgtcgtcggcttcagcccagtagaaggagactcgaaaatacgcacaacaggcaccgcacgtcatgcacgggttgatttcactcataattacacctgaaaaaaacgcatcaacacaaattgtcggcaattaaattagctatccgcacgatcggcgacaagaggggaagcaaaaatttttctcatgggtaaaaattgatgtaaagacgaatcaggacgttactaactgctgcaaaaattaatctggatcaataaatgttaaatctaatggcctggtgtgatctaaaacagatcaaagctaactcattgtaggtatatttgcagccgctgataaaaaccataatggggacatggatatgaagaaaatagcagcggcggcattgatcttaggtacactttccggtggtagcgcctgggcgcatgaagcgggggagttttttattcgcgcgggttcggcgacggttcgcccgactgagggttctgacaacgtactgggtagtctcggcggttttaacgtcagtaataacacccagttaggtttaacctttacctatatggcgaccgacaacatcggtatcgaactgctggcggcaacgccgttccgccacaaggtcggtaccggtccgaccggcactatcgccaccgtacaccagttgccgccgacgctgatggcgcagtggtactttggcgatgcgcaaagcaaagtgcgcccgtatatcggtgccggtattaactatacgaccttctttaacaatgatttcaacgataccggtaaggacgccgggctttcggacttgagcctgaaggattcatggggcgcggcaggacaggttggcctggattatctgattgaccgcaactggctgcttaacatgtcggtctggtacatggatatcgacaccgatgtgaaattcaaagccaacggcgttgaccagaaagtcagtacccgtctcgatccgtgggtatttatgttctccgcaggttatcgcttctaatgttttaaaaaactggccgcaggcggccagttttattttgtttagaccagtcgatgggcgtgcagtttggcgctttccattatgctatccattatcacctgcacgcgatgcggtaacacgccgcgctgacgataaatcaaccacgcctgcatattcacgccgcgttcgcgcggcagacatggctgcagcgtaccggcctctaattctgcggcaacggagtaaaaaggggcataaacgatgcccagtccctgtttggcaagctcaatggccggcaaaatgttatcgcatacgctggaaccgttgacctctacctgaatactctcacccgctgcgtcatagcaatgccagctgttgcgaatcccgcccaacgtacgcaaagtgatgcagcggtgctgcgcaagctcatcaacatcgtgcagaggcgactgcgcaatataatccgcgcaggcaaacagccccatgcgaaagcgggtgagaggccttgcgatcaggctttcgtcctgcggttggaaaaagctaatcagcagatcgcaatcgctatcgaaaagcgtcccgtgtttctgttcgcgctcgtcgggattgcgggtgagaatattgacggttaattccggcgccgaacgtagtaccggcggcaaaaggtatcgggcaaggaaagcctgaatgccgatcggcgcgccgagggtcaccatgccgttaaggctgcgtttccaggtaccggacatatcaagcagatcattatgcttatccagcagaatgtccgcccggcgcaggaactgctcgccaaactcgctcagaattaacgcccgcggatggcggataaagatctccaaccccaggcgccgttccagcgcattcagcgcccgcgacacattcgactgcggcatgtccagtagttgggcggctttgctcacgcttgccgtttcggcaatcatgcgaacgatgcggagttcgtcaatgcgcaggtctttttctttcacaaggttggttcttttggtttgctatatcaaaaatgatatacatctttgccgtcattgtcatatgacttctggccagtagctgggtattatttgcatggattatttattacagccgaaaaatacagagaaataattcgatgaaaataacaacaatggctgcgttatctgcaatgttgctgctggcagcgtgcgcttccagcgaaaccgaaaaagaaaaacatattgaatatgacgatattatcaagggactatcggtttcggcggaagagatattataccagaaagataaaagtactgatttttaccgttatcaatatttggtctatcagttggaaaatgattattctcggcactgccccactgttacagtgagtggcattgctaattataaaacagcgtagttagtacggtttaccttttttattaccaggtgttattatgtttcttaactacttcgccttaggcgtattaattgccgtttttttgattttattttacggcattattattattcatgatattccctatttattggccaaaaagcgccagcacccgcatcaggatgcgatccatgtggccggctgggtgagcctgttcaccctgcatgctatttggccgctgttgtggatctgggccacgctgtatcgccccgagcgcgggtggggaatggcgcataaagtcgaagataatgccgaaatggatcagcgaatcaggcaacttgaaagcgagatcaagcgtctgcaggaacaaaatataactgttacgacaaactcgtcaaataaacgctgaggccaatttatggatttactcattattctgagctatgtggcgttggcctatggcgtatttaaaatttttcgcatcccggttaataaatggacggtgccaacagcggttcttggcggcgtgtttattgtcggtgcgctaattctgaccatgaattataaccatccgtacaccgatcgggcgcaaaaaattgctctgtcgattccgattgtgccgcaggtgtcgggggccatcgtagaagttactgataaaacgaatgtgttattacgcaaaggcgaggtactgtttcgtcttgatgatagccgttatcgtgcgcgactgaataaactggaggcggatctcagtgccgccgaagcggatatcagaacccggaaagcggcgctgagtgaatccgccgccaacgtccagcggatgacggcggaatatgaacgcgcccgtcaggattatcagcgctatgcgaaaggcgctgccatgccggtaaatcctttttcagagcaggatgtgaatcacgccgagcagcaatatcaggcgcaatccgcggccctgcgggcggctaaagcccagtatcaacaggagttagaaagactttctgcgcgtttcaatggcgaggatgcgcaaatcgccagcctgaaatcgcagattgccgaagcgcgttatgaccttgatcagacggttttccgcgcgcccagcgatggttatgtgacccaggtgctggcgcgaccgggaaccacggcagttcgtctgccgttcaaaccggtgatgatttttattccgcagcagaaacggcaggtggtggcagtttttcgccagaacgccatcctgcgcctggagcagggggacgaggcggaggtggtattcaacggtttaccggggcaggtatatgccggcaaggtcacaaaggtactgccaaccattcccgacggcagttaccaggcgagcggcgcattacagggtttaagcgccacgcccggtcgggaaggggtgtatgtgatgattgacctggcggcgaaccgcgatcttgcccatttaccggatggggtcagtgcccaggcggcggtgtataccgaccattttgcccacgtgtcggtgatgcgtaaggtgctgttacggatgaccagctggttgcattatctgtatctcgaccactaaaagccgaagttgagtcaaaaaaaagcccgcgataaacgcgggcaaaaatactggaagcaatgtgagcaatgtcgtaccgaatacctgagttgttcactcaactattcggtaatgagaaagataatatttctcatttaagatatcaaccccagagtttgtgcggaggcgaatttttttaatcaagggtgaaaaccgtgcgtttctgactattatcacgcggccaggccgcagcgacatcgcggagaggcagcggcgtggtggcgatggtaaaatgaccgggaacagcagcctgcagcatctctccggttgccgccagcagttgcggcattgtcaggctgccgatgccgctgcccatgagctgtagcggcgcggcgcgaagaaccgcgccatttaacgcgatatccgccccggtaagggaacccacctgcacataacgtaccggcttatcgccggggtatatttcgccagcatgggcagcagcaactctgcgctgcgtccccacaaataatcaacgatcacatcaattttcccggcgctggcggcggcgaattgtgcgctaagcgtctgctcatcggccgttaagttaatgcattcatcggcagcgaggtcggccagcgtttgcgcattgcgcccggtagcaatgactttcttcgcaccgagatagcgggcaatctgcaccgccagctgtccggcgctgccggtggcgccgttaatcagtaccgtttcaccggcctgaaagtgggcccgctttacaagcgcagcccaggctgacatgcccggattggccatggccgcggcgctgatgtcgtcaagttcgtccggcagcggcaggcaattctgcagcgcgaccggcgcgcgttgcgccatgctgccgaacggcgcgctggggaaagcaaaatagacgcgctggccgtcaggggtcataccgacgccatcgataccgacgacaaacggcagagtgccgtcaaaactataatgatgtcctgatgcccggcccttaaccacatggcttatggcggcggcgcgaacgtcgataagcgtgtgtccgacggcaggctgcggttcggtaaaatcggcccataccgggccttcgctaagatcaaataccgcggcggatttcataacattatctcctgatggtaattatgtgtaatatgcacatattcttcaggagcactatacgtggttagcgaatatatgcaagatgcacataataattacgacatcaccgattttcacggcgcgctgctggatatcgtcagcgtgatgaatcaaccgctgcgtgatgagcagatattacaggcggcaggggtgcagcttgaacagatgctctttccgttactggttgcggtagggcgctatggcccggtgggggtggttgagctggctgatcatttaggccgtgattacaccaccgtcagtcggcaggtgaaaaagctggaggctcaggggcttgcctgcaagcaggccaatgccaaagaccgacggattagcgaggtgacgctcagcgaaaagggcagcggatgatcgacgctattgccgttgcgcggcggcagttaatgaatcaggtgctggctggatggtcagaagacgaggtgctggcgctgtttcgcttaacgcgaaaatacgccaacagcctgcagcggaaatagccgcccggcgtgaggccgggcgacaaagggtcaggcggttttggttgccgctttcaggctctgcacgaaggtttttagctcttcgagcattttttgcggctgttcaaggttgcgttcgataatcttgacgatggccgagccggatattgccccggcggcgccggcgtcaatagcggcggaaacttgttccggcgccgagataccaaagccctgcagcggcggtgcggcgttatattccgccagtttttcaatcagatgatgtagcggcagcgcggcgcggttttccgcgcctgttacgccagcgcgcgatagcaggtaggtatagccgcggccataggaggcaatctggcgcagtaaatcgtcatcggcatttggcgggcagatgaaaatcggcgcaatgttatggcgcagcgctgcctgacggaacggggcggactcttcgaccggcacgtcggcaaccagcacggaatccacgccgacacgcgcgcattcggcgtagaactcatcaatccccgggctgaacaccaggttcgcgtacatcaaaaggccgattggaattgtcggatgcttgtggcggattgccgccagcatctcgaagcactgcgccgggtgacgccggcggcaaaagcgcgtaatgtcgcgccctgaatcgtcgggccgtcggccagcgggtcggagaaggggatccccaattccagcgcatcggcgccggcttcaatcagcgcgtcaatgattttcagcgactgctccggcccggatcgccgagggtgacgaagggaacaaaggcgccttcctggcggttttttaactgtgcaaatagcgtctcgtaacgttccatcagatttcccctcgcgctttcaaaatgtcgtgtacggtgaagatgtctttatcgccgcggccggataggttaaccaccagcaactgctctttgtccggattctcgcgcatcatcttcagcgcgtgcgccagagcgtgggacgactcaagcgccgggataatgccttcatggcgggagagcgctttaaaggcatcaagcgcttcgttgtcggtaattgacacatactcagcgcgcccggtgctgttcaggaacgcatgctgcggacccactgatgggaaatccagtccggcggagatagaataagattcttcgatctgcccgtcggaagtttgcatcatcggcgacttcatgccgaagtaaatgccgacgcgaccgtgcttcagcggcgcgccgtgctcgccggtttcgataccgtggccggcaggctcgacgccaatcaggcctacgcgggattcatcaatgaaatcagcgaacatgccgatggcgttagaaccaccgccaacgcaggcgatcaccgcatccggcaggcgtccttctttctcgaggatctgcgctttggtttcttcgccgatcatacgctggaattcacgcacgatagtcgggaatgggtgcgggccagcggcggtgccaagcatgtagtgcgctttctcgtagctgccggaccagtcgcgcagcgcttcgttacaggcatctttcagggtggcggaaccgctgtgcaccgggatgacttccgcacccatcaggcgcatgcggaagacgttcggcgactggcgctcgacatctttggcgcccatatagatgcggcatttcagaccgagcagggcgctggccagcgccgaggcgacgccgtgttggccggcaccggtttcggcgataatttccgttttgcccatacgtttggccagtagagcctggcccagcacctggttggttttgtgcgcgccgccgtggagcagatcttcacgcttgaggtacagcgtggtgcgggtgccttcggtcagattgcggcatttggtcagcgccgtcggacgacccgcgtagtttttcagcaggtcggtgaattcagcctgaaattcaggatctttttgcgcgctgacgaaagcttcttccagctggcgcagggcgggcatcaggatctgcggaacgtacataccgccgaattcgccgaaatacgggttcagtaaagtgctcattattgcattgctccttaatatgcgcgcagcgtctggaaaacggcagccaccaggcttgcctcttttattcccggctgcgactctacgcctgagttgaaatcgagtccggcacagccgcttttcgcggcttctacgcagttatcggcgctaaggccgcctgccagcatcacgttacgcaggtcctggccctgcagcagcgaccagtcgaaacgttgtccgctcccgccctgaccgttgtcaaagacatatctggccacatggttcaggttacgcggcggcagtgtttcgcctacgctcagcgccttccagatttggatctgctccggcaacgccgcgcgcagggcatcaatccaggcctgatcttcgctcccatggagctggaccgcggcgagtttcaatttggtcgcgcgggtgacgacctcttctatagctgcatcgcggaatacgccaacgtagctaagcggcgcggcggccattaccgcctgtgcctgctgatcgtcaacggcgcgcggcgaaccggcgacgaaaatcaggccgccgtagatagcgcccgcctcccaggcgacttgcgcatcctgcggacgagtcaggccgcagaccttgttctcccctaacagcacgcgcttcaccgcagcgctgagatccggttgctccatcagcgccgagccaatcaggaagccgttggcgaagtggctcagttcgcggacttcgcaataggtatggattccggattcgctgatcacggtgacatccgggccgagacgcggcgccagttgacgcgtgcggttcaggtcaatcgacatatcgcgcagatcgcggttgttaatgccgacgactttggccttcagcgcaatcgctcgctccagctcctcttcgttgctgacctcggtcagaacgcccatattgagactatgggcgacggcggcgagctgtcgatattgatcgtcatcgagcaccgaaagcatcaacaggcaggcatcggcctggtagtaacgcgcgaggtaaatctggtaaggatcgatggtgaagtctttacacagaatcggctgcggcgcgactttgctgacgatcggcagaaaatcaaagctgccctgaaaatatttctcatcgcacagtaccgaaattgccgaggcgtagtgcttataaaccccggcgatggtcgctgggtcgaaatcttcacgaatcagtcccttcgacggcgacgcctttttgcactcgagaataaaagcggtgcgggcgccggccagcgcatcgtaaaaatggcgttcggacggcactatgtcattctgaaaactggctaacggttgttgttgtttgcgggcttctacccaaatcgctttgtcggcaacgatttttgctaaaacggtctgcattatttaccctcttgccgctaatgcggtcactctgtcataggccgctccgctgtgcagcacatccagtacctgccgggcgttggctttcaggtcttcatgcccgtgtaaacgcatcaacatggcgacgttggcggcgacggcggcttcgtgagcggcttcacctttaccttgtagcaagcgcgtgagaatgtcacggttttcttccggcgtgccgccggccagttgatcctgatggtatggcgtcagcccgaagtcggcggcggtcagctgatagctctggatttcgccgttattgagttcggcgacgacggtcggcgcatgcaacgatacttcgtccatgccgccgctgtgtaccacggcggcacgttgataaccgagcacgcgcaaggtttctgcaatcggcaacaccagttccgggctgtagacgccaatcaacgccagcggcgggtgcgccggattgataagcggccccaatacgttaaacagagtgcgcgttttcaactgctggcggaccggcatcgcgtggcggaaaccggtgtggtatttcggcgcgaacaggaaacagacgcccagttcatccagcgcggcgcgcgatttatcggcattcatatccaggttgatgccaaacgcggccagcaggtcggacgagcccgatttactggagacgctgcggttaccgtgtttcgccacctttaaaccgcaagcggcggcgacaaaggcgctggcggttgagatattgatactgttgctgccatcgccgccggtaccgacgatatcggcaaacggatattccgggcgcgggaacggcgcggcgttttccagcagcgcggtagcggcgccggcaatttcctgcggttgctcgccgcgcactttcatgcttaccagcgcggcggccagttgttccggcttcacttcgccgcgcacgacggcggaaaacagcacgtggctctcctgctggctcagcgtctctgcctggtacagtttttccagaatcggctgtacaacattggtctgctccagtttctgcagcgcccatgccagcgtttgctccagcagtagcgccccctgggtagtcagaatcgactccggatggaactggaagccgcagacgcgatcggcgtcgtggcgaaccgccatcaccataccgttgaaattggcgttaatggtgagcccggccggaatattgctgccgaccagtgaatggtagcgagctaccggcagtgggttggcgagaccggcgaacatcgcctggccatcatgctcaatactggaggctttgccgtgaaggatttctcccgcctggccgacataaccgccgtaggcttccacgatggcctggtggccgaggcagataccgataatcggtaacttgccgcgcaggcgggtcagcagctccggcatgcaaccggcttcgcttggcgttcccggcccggagagagcatcagcaccggattatccatggtgccgatacgttcaatcagcgattgcgccggtacggtattacgataaataaccacgttgtggccgttagcccgcagctggtcggcgaggttataggtaaaggagtcgatattatcgagcagcaggatgtcggccattagaaagtctccttcgcgtggtgggcctgagcaatggcgcgcagcacggcgcgagctttattacgggtctcatccgcctcggattgcggaacagaatcgagcacgataccggcacccgcctgtacggtggcaatgccatcctcaacgtaggctgagcggatcacgatgcaggtatcgaggtcgccatgggcggtaaagtatccgaccgcgccgccataactaccgcgacgcttgccttccgcggcggcgattagctgcatggcgcgaactttcggcgcgccgctaagggtgcccatattcatgcaggcacggtaggcgtgcaggacgtcaaggtcgcggcgcagttcgccgaccacgcgggaaaccagatgcatcacaaaggagtagcgatcgactttggtcaaatccgccacgtagcggctacccggcgtgcagatgcgggccaggtcgttacgggccaggtcaaccagcatcaggtgttcagagagctctttgtggtcagtacgcatctccagctcaatacggctatcgagatcgcgatccagcgaaccatcggcgcggcggccgcgcggacgggtgccggcaatggggtagatctcaatctggcggctgacggcgtcgtatttcagcgagctttccggtgatgcgccgaacagggtgaaatcgttatcctgcataaagaacatatacgggctgggattgctctttttcagcacatcgtacgaggccagcggcgacgggcaggggagtgagaagcggcgcgacggcacgacctggaaaatttcgcccgcgcgaatggcgcgctgcattttgcgcaccacggcgccgtactcttcatcactctgatcgacgtcgcagcgcatttcggcaaccgtcgtcaccggcagcggcacgggcggttcatttaactgctggcgaagctgggcgatacgttgcaaaagacgctgtttctcattctccagcggtgtgaacaggctcgcctgaatgcgggtgcttttggtctgatgatcgattaccagcagcgtctccgccaggtagaaacagtaatccgggcaggcggtatcggtattgagcggtggtaaatcctcaaaaccggccaccaggtcgtaagcgaacaggccgccaaagaacatcgcttcgcgctcggcctgcgggacgctgactaaatcctgtaacagacgaaacgcatcgaacaccgataacgagcacaggcgagcgtcttcatccaacagggcgctaaccggtgggaaggtgagtacacggctgttcggctggcgcagattctcaatgccggacggcaatgcattatccagcagttcaagcagcgcggcgccgttcgctgacagcgcctgaatagtgacggtattgccaagagcggtaatgcgcagggcgctatcgaccagcagcaggctttttaaatcgtctttactatcgatgtcggccgattccagcagcaaggttgccgggcgcgcgccgcataattgatggaataacgctgtcgggttttcgcgatagatggcgtcgctggtgagaagctcgagcgctggttttgatgtttgcattatcattctcgcctgttctgtttattattttgttcaaaaaaaagcccgctcagtggcgggccaggtatctgtttgctgagtgcaaaacgcgatcacgccgcccgattccaggaacgacgccaccagctatgaagagtaataatttgcgttttcatcagagatacccgttgtgtgaacttgcgtactagttaactggttcatgaaaataaagtcaacccttgtttgcagattttctttctcagtcgttatcataatgcgcttatttcagttcaggtccaccaggagccatcttgagcgacactaattacgcggtcatttatgacctgcacagccataccgtcgcctccgatgggcgattgactccagaagagttggtacaccgcgcgcatgagatgcgggtggggacgctggcaatcaccgatcacgatagcgtggcggccattccggcagcgcgtgccgaaattgagcgggctgaactgccgctcacgcttatcaccggggtagaaatttccactttgtgggaaaatcacgaaattcatatcgtcggactgaatattgatatcaaccatccggcgatgacgcaactgctctgcgaacagaaagcgcggcgcaaccagcgcgggcagatgattgccgaacggttggagaaagcgcgtatccccggtgcctgggaaggggcattaaagctcgccgatggcggcgcggtcacccgcggccattttgcccgctttttagttgaagccggctttgcgagcaatattgccgatgtattcaaaaaatatctcgcccgcgggaaaaccggatacgttccgccgcagtggtgtacaataaaacaagcgattgatgtcattcatcattctggcggcaaagcggtgatcgcccatccggggcgttacgatctctctgctaaatggttgaaacggctgttggcccattttagcgagcagggcggcgacgcgatggaggtcgcccaatgtcagcaggcgccgcatgagcgcgcgcagctggcgggctacgcgaaacagtttggtttgatggcgtcgcagggttcggatttccaccagccctgcccatggatcgaactggggcgcaaactttggctacccgctggcgtggaagggatctggcgcagttgggaagtggccgctgaacaaattgagagggaagtatgagccagtttttctatatccatcccgataacccgcaggcgcggttgattaatcaggcggtggaaattgtgcgtaagggtgggttatcgtttatccaacggactctggctatgccctgggatgcaaaatcgaagataaaggggcgatggagcggatctgccgtattcgtcagttgccggatggccacaatttcaccctgatgtgccgcgatctctcggagttatcgacctacgcgtttgtcgataacgtggcgtttcgtcttatcaaaaacaatacgccgggcaactacacgttcattcttaagggaacgaaagaggtgccgcgccgcctgttgcaagaaaagcgtaaaaccattgggatgcgcgtgccggcgaatcctatcgcccagatgctgctggaaacgcttggcgagccgatgctttcaacatcattaatgctgccaggtaatgaattcacggagtccgatccggaagagattaaagatcgtctggaaaaggtggtcgacctgatcattcacggcggttatctcggccagcaaccgacgacggttatcgacctgaccgaagacgcgccggtggtgcttcgtgaaggcgttggtgatatcaaaccgttcctgtgatgcttttcgcgggtggcgtttcacgcgccccccgcgactaaaatttattttaaaatcccttccgcattgagtcgctcctttcttatttatattattagtccgcttacgatatcactcactgatatcgcttccagaaagaaattcaacattatgcataagctgactattcaaccctctgacgcatttaagagggagaaagtgctgttaaattttttcatactttccagtgttaccgttaccttatatcttgtgggtaaagccatacgccatagcgatattgctctgttctggccactgaatgcggtgattgtcgggttgtttattcggcataagaccttgcgccatatcaaatacgcagcggttgttgtagtcgcaatgctgttaacaagtcttactacgggcgaccgaggtgtctatagcattgtgctggatttctctaatgtattatttatgttaataatgtattggctgataataagagaagaaaagtcagatgaagacaatttaaaaataaccatctttcgaatttacagttactgttttatcaccgcgctattttgttcagccctggggagttatgtgtttgccggcggtattcacgctgatttctggaaaatatatcctgtttggtttagcgaggagtttacgaccagcgtgctcattctgccgtttacgctgttgtgccagaaaaaagaaatttttagcgcatttaccctgcggcagttagtaccttttggtatgttaatggcttcgctcctggtctccgttcttagtggcgtgacaggaagtatggggaccttgtcgatgattctcccggcgttaatttggtgcgcgttaaactattcattatcaaccacctgcttgctgaccttactcgccggaatggtggaaatgttgatggttgatcagcatgccattgagtcgaaactggacgcgtatctgcctatggttatctccacccgtcttggtatcgcttctattgctattagccccgttatcgtggcggttagcgttgaggcgattaataagctggtgaaacaactttctcggcaggtacgctacgattatctgactcgcgtacattctcgttttggactttatgaacatctacgggaactaaaagcgacggaaaatgagacgtcgctaaacgtgctggtgcttgatatcgaccattttaaaaatattaatgacacctggggccatgactgtggcgataatgttttaacgactttcgccaggcgggtcaaaaatattgttgccgatcgtggggtgattgcccgactgggcggtgaagagtttgctgtggtgatgacgggaaaaccaggtgaggagggctatcgtttagctgaagatattcgtcaggcgattgaagagatggatatcgcctggcaaagtgccaatttatcgctaaccgtcagtattggtcttagctatggtcgggtgatgcgctggaatattatagatagcttcgaccgtttattatctgaggcggatagctatctttatcggtctaaaaaagcgggacgtaatcgaattagtgcatctcctgcaataaccaatattgttaccgggtgatagccgatatcaaaacctgacagcactcgttaataatgaccttttactcttgattgaatattgctaatttatgccaaaactgacctcaaatacctatcccatctccctggtaaaaagtgtgctgattgtttcactgctggcgctaatactgattattatcagtctgactggcatgtttaactatcagtcgcgtcaggtcagtactgccattgataaaaaaatcattggtactcagtatgcgttgattcagcataaacttgaggatgccgttgaccgcccgcgacaaataacgaatctatttttacaatatattcaggggaaggtaataacatcgataaggatgctttggttcctgaaatggtgtatttgactgcgagcgcgtttaaaactatgccagcctttcaaagcctgtcgtggtttgcagaaaatggtgcctgtattgcggttattcgcgacaatcacagtaatcaaatttatttgcagcgaacccagcgcgataatcatcactctctggttaaatacagcggcttaagcccgcagaccaatattgttaaagtcaataacgcatttaatgttgctgatttaccgcagtttcgtcgcgcgcgccagcaaacgaacggtttttggcaacgctctctttcaaccggcagcatgatcatgagctggaatcagccggtgtacgataagcaaggtcgctttatcggggcgatcgccagtggcgccacacctgcagatatgaccgcttatttacagagtctcctgccggataaaagcgatgcgcttctgcttattgatgacgataatcgtattgtcgcgcgttccggcaaccaggatatatggcaacagaatcgccatctgatagaaaagcttacttcggcgcaaccgtcgccaacgtcattttccttgcgtcttgaggataagactttcctggcaaccgcctttagcgtgcaggaccgccaacatctgctgaactggaaggcgttacttatctccccgcagcatgcggaaatggcggagatgaataaagagcgtctacttttgaccttcgccacggcgctgtttatttttattctgatgttggttctgctaatgattatttcgcatttcactggtgccttaaaggatgttgcagacaaagtgcgtctggggttgatgccgtggaagaaacaaactaaacgagtatttccggaaatagcgtcgttggatgcagcattgagcaacctttgttcaattattccagacactttcgaatttaaacgccgaaaactggaagaggatagcgaaaccggttttttaacccgtagtggtttactgcattgtgagtcgctctaccatcatcgcaatatgctggcgatggtacacgttaacaactacaactcagttaagaatgtgcttggtacttctcaggcccggcagtttattcaccagtttgctttacgtattcgcaaaatgttgcctgaaggggcactatgttgtcgtgacagtgaagacttgttcattattgcttttgacggcatttatgccgaaaaagatgtcgactggtacagcgcgcaacttgcttccgtctttcgtatgtccgtatctgatatacccggtgaatcgcatatatttactggccatattggcatgttgattgagccacttaccccagagaacatcagcgaatgcctgatgaatgttagtctggctttacagcacgcccagacgcagcgtagcggtatgagcaaactattcactgtcgccatgcgtgaagaggaagtcaataatctgcgtctgcatcaggcgttatgcgacgatctccgttcagaaggtttccatttggttttgcagccgatcgtcgcatttgaatcgcagcgaccttgtaaagaaggcgaatgcctgattcgctggcaatcaaatgtattgggtttcgtgccgcccgacaaatttattgcccttgccgagaataccggcatgattgtgccgttagggaaatggataattgaaaccgcctgtcgtgaacttgccgcgtttatcacgcgcggcgcgccgcgtgattttaaactgcatgtgaatatttctgcaattcagcttcagcaacctgattttgctcagcatctgctggaatcaattcacgctaatgatttgatgaatagcaatatttgtctcgaaatcaccgaaagcgttttgttacatgacacgtggcggattgtcgaaatactggcttatttacgccgcctcggcgtttgcgtcgcgattgatgattttggttccggttattccagcctctcgtatctgcactcgctgccgtttgattgtctgaaaattgaccgcgggtttgtcagcaatgtacttaacgataaaaaaagcgaagcggttatcgcctcggtgttaatgctggctagaagtttttccgtgccgctggtggccgaaggcgttgaaacgcgcgaaatggcggaaaaactccaggagatgggttgtgatttagcccagggatatcattattcccggccgaatacgtttgatagttttgacgtcaccaatgggcttttcattgttgaaccgaaatgatgagatggacgaaccgcgataataacgatgcagatattaaaaaaacagctttcggtcaatagctacccgttcaccctaacgcaggccatcatatttaccttagccacgacaattatcgttgtgctgctggcgacatatgcttttctctactacgaaggttatgctttttttgatgaggtgagtgaggatattctgcgcgcgcaaagagtcaatatcgaggaagttatccacgattatattgatgttcccgcgcaatcgaacgcaatactggtccatgctatcgggcgccaaaccagttctgcgatcccggttcgcagcctgatcggtgaaatggtcaataccaccaataacgtcttcagtaataaacattatctgaatctggttgaatttggcgcggtgaatggtgattttattcaggcggcgcgtggccaggccgcgtcgaatgattatcttgcggtaaaagatgcgcaaacaggtcatcatttgacggcgtatagccacctgacggtgaactcattggtaaaagcggtgctagcggattatcaaataacgcagcgcgaatggtatgcggcggttgccaaagaccagcgtccgcactggacaaaaccatttcgcgattatgaatatgataatgaaattggcgtcgcgttcagctcaccggcatttaatcgcctggggcagtttgttggcgtcgtcgccagcgagttgcatcttaacgaactaaacaaaagcctggaaaaatttaaaccccatcctgaaagtattctgctgattgttaatgaaaaaaatgaactaatttcctcatcagtgccttcattgacacgaagtatgttggccggcggaaaacactcgccgctgaatttgcaaacgctggaaaatactcagttaccggttgttgtcgcagccagtcgtacattaaaagcgcataaccatacgggattgcagtttttcagttccggcaaagaagaatattatgttgatgctttccctatcaccgaccgtgatgacatactgcactggacggggattgtgattagcccggcgagaatgattactcgtactatcgttaaatatatagccatcaccatgggcatgctgtttgtcatttttgcccttggcctgctggtggttttctgtggcctggcgagggtggtaaaaccgctgcgagatattgtccgtaaagcggatcagcttgcgacacaccgctggacgccaccagataataagcgtcatttcccggaaattgcctctctggaaactacatttatggcgctatcgcataagctggcggaaagcttcgacgcgcagcggcgcgaaatagaagaggacaaaaccaccggcttattcacacgcacagggctactgcgtcagacatctctatatcaaggtagaaacctgcttgcgctactgcatatcagcaatatgagcaccataatcaattccttaagtacagagtatggtgaaaaattccttagcgattatattcttcgtctgcgtaattttttgccgacgaatacgctgatcgcccgtgataatgtggataagcttatcgtggtttttccaggtcaaactcagccaaaagagcgtcagcgctacagagaactgctttcctcactctttatcgacgtcaaaaatgaagcgtcttctgcggtaagcaaatacgtttataccggaaatattggtctggttgcggctaatatcagcgagaagaacattgaacaaacgttgcgtgaggcctggattgccctacgtcatgcacagaaacagggaaatggaatcgcgacgtttttcagcggtaagatgcatgaggccgagctttataatatccaacttcatgagtctcttcatgacgcgatccagcatcatgaatttcatctggtgctgcagccgattgtggatttacaggatcagagcgcttttcaggaaggagagtgcttgcttcgctggcgctctgaggcggcaggggaaattccacccgatcgtttcattcccctggcggaagagagtgggctgataatcccgctggggcgctggattattgaagaggcctgtcgggagctcgccgggatgattaatcgtggggcgccggcgaactttattctgcatatcaatgtatcggcgattcagctgctgcaacaggattttgcctggcatttaatggatgctatctatcgtcatggtctggtcacgggcaatatttgtcttgagataaccgaacggttactgatggattctgctgccagaattagtcgaatgattgcttatctccgccgccatggtattgccgtagcgctggatgattttggcgtcaatttatccagtctgccttatttacacacgctgtcatttgatagcatcaaaattgaccgccgtttgatttgccaatttgccgatgatgataaagcagaatcgatgattgcatcgctgattgtgttggctcagggctttaaggtgcccgtcgttgctgagggtattgaagatgaggctataaaaaaccagttacgcgacctcggttgccagaaagcgcaaggttatctgtttggtcacccggcgccatttgcccactttcccttccaggcaagtgcattgacggtgagcgataatctatagacagagaaatgtatcgctgggaatcattcattttgaagttagtgtagtacgttcgcccacgcaggcgcgcgcgctgctgtacagcgctgacgaatggcgccttaaaatgtgtaaagtatttatataacaacaggttggtggttttagatggcctgttgttgccaaagcttatcagaggcctgggaatgcgtacaagtaaaacaaaaacacattatatatcaaagcgttaaatttatttcgtttatggtaaccatcatgttgtgtgacaggtttagctgcactttgtatctcctctataatgtacataatttttgagtctttgactgtctcaactatctggcggttctggccatctccatatcaccaacggcgctttatggcttctattgcctgttgcggagttgtaaaaaaatcagtagcatcatctctttcggagttgggaaatgtctgtcactgattcacttcttacttatactcttgctgcaacacttctaacgttaaccctggtcttgatactgccctcattctacgtactgccactgtcgaaggtggtcgaaaagcctttcatgctgctttaggtattgatacaggatgctttatctggggtgcactggtggcctttggtttgggggcgctattggcggtttctgaggtcgcctacatgctgctgaaatggtgtggggcggcttatctttgctggttaggtattcaattgctattgcgcccacggcagcaattttgcttgaagcaagggggtaacgatccagcgaataactggttcctgcgtggtatgttggggaatgtactcaatcccaagatgggtattttttatgtttcgttcctacctcaatttatccctgtggggcattctccctttatctggacattccttctggtctcgattcatgtgttgattggtacgctatggtcactaattcttatttcagccacacattatgcctctgggattttgaaaaaacctgatgttgtgaaatggatggatcgcagcactgggggcttgtttctattgtttgcagcaaaactggcaatgagcagaagataaaaaaggggcattgcgccctgacctgctccccattgattaatacaccgcgatgttagtaatgtctttataagccacatgaggacatccccatgaagaagcgtttttccgacgccacctattatacctggcgtaagaagtatggcggtatggaggttaagcgcctgaagtcgcttgaggaagagaacgccagactcaagaacctgcttgccgaagccatgctggataaggaggcacttcaggtggctctggggcgaaagtactgacgacagaccagaagcgggaagccgtggtattgatgtgtgatgcgaccggtctgtcgcaacgtcgtgcctgcatgcttataggcttgtccctgtctacctgtcgctatgaggctcagcgtccggcggctgatgcgcatttatcagggcgcatcattgagctggcactggagcgcaggcgttcaggtcacgcggatctgattcatgatcacttcagcttgtttttgactgtcagtaccaagactcagacgtacaaaactagttgaatcatttagtctaaaattcgtgtagtatgtgcgcccacgaatcatagtgtgtgacatgttgtttgccatactgtgtaccatgaaatagttacagatcagtgagttaagtttattttcaatctaactcattgtttttaaaagtataccagacgcctgggaaggcgacacctaaaggaagctctatgagcgagaaattacagaaagtgctggctcgtgctggccatggctcccgccgtgaaattgaaactatcatcgaagctggccgcgtcagcgtggatggtaagatcgcaaccctcggcgatcgtgtagaaatcgtacctggtttgaaaatccgtatcgacggccatcttatttcggtaaaagaatctgctgagcagatttgccgggtattggcctattacaaaccagaaggcgaactctgtacccgtaacgatccggaagggcgcccgacggttttcgaccgtctgccaaaactgcgcggcgcgcgctggattgcggtaggtcgcctcgatgtgaacacctgcggcctgttgctgtttaccaccgatggtgaactggcgaaccgattgatgcacccaagccgcgaagttgagcgtgaatacgccgtccgcgttttcggtcaggtcgatgaagacaaactgcgccagctggcgcgtggcgtacagttagaagatggccctgcagcgtttaaaacgattaagttcactggtggtgaagggatcaaccaatggtataacgtcactttgacagaagggcgcaaccgcgaagtgcgtcgcctgtgggaagccgttggcgttcaggttagccgtcttattcgcgtacgctacggcgatattctgctgccaaaaggcctgccgcgcggcggctggacagaactggatctggcgcagaccaactatcttcgtgaactggtggagctgccagcggaaaccgaaagcaaagtggcggtagagaaagatcgccgtcgtatgaaagcgaatcaaattcgccgtgctgttaagcgtcatagccagaccagcggcaatcctcgccaggggaataacggcaaccgccgttccagcacccgcaacaagacaaacggctaatgctgtacgttccggcgggttcccgccggaacgctcctctttttcccttcgcttgtgatatttttcacacttttgcataaagacaagaaacaggaattacgcagacaaataacgcaaagtgatgttattagcgtcgccatatactgtcggcactgattacaaaaacaggtagcccgcaatgagtacaacaacaaagttatcggcaagctatgtggtcatcggcgtaaaagaaaagataggctatggcttaggtgatttcgcttctaatttatcgttcggttttgtctcgttattcttactgtttttttatactaatatttatggcatcagcgcggtacaggcgagcctgatctttgtgattgcccgggtgattgacgcaatttttaatattcttattggctttgcaattgataaaacgcagagtaaatatgggaagttgcgtccatggctattatatggtgcgataccgttaggctttttgaccgtgttgtgttttgtgccatttggcgggaagctaaattttattttgcgctggcttcctataccatttattgcctggcatatacagcagttaacacgccttattcggcattgaccaaccgcctgacgcagcatgaagcctcgcgctcgtcgctgtcggtataccgctttgtgttggctattgtcgggtatctgattgtttctacgacggcagactggctgatttcgccctttaacgacaaacaaatgggctatgtctttgccgtttcctgctttgcgctgttagcgacttttatgtttcttgcctgttttggcatgaccaaagaacgcgttggcgaagaggataaaatgaatgcgccgacgcttcgcgaaatgttccgtgcggtattaggtaatgcaccactgattcatctttcattattcaccgtgtttttctatatcgcctataccgtatggatggcgatcgccatctactttattaaatatattattggcagcgaaggttttaccgctactttcttcatggtgcagtcaggcgcttatatcattggaaccattgtctctgagaaagtgattgcgctaatggggaaaaagaaaatggcgcttctggcattgttaattggcgtgctgggagtactgatgcaatatttcatcgctggtaataatctgtggctgataatgattggcgtgtgtctttacagcattacgcttggcatgggctttgtcgccatgtggtcgatgattgccgacaccgtcgaatatgctgaatggcatcacggcgtacgctctgaaggcgcaatctacggtttctttaacttcatcaccaaaatcgcgatggcgattggcggcggttgcgcgggctggatgctggatctctatcactatgatgcgagtaatgtgaccagcgatgcgattaatggcatcaatattttgatgacgcttttccccggcgcgatgttcgccatcagcgctatcttcgtggcctgctattcgttggatgaaaaaacctatcgcgatatcgtgcaaaaaataagcctgcgtaagcaaaacgcgctttaacctcaaggagtcagagagatgaacaatgattttagtaccgttatcgccgccatgtcggtagaggaaaaagtggcgctgctgaccggctgtggcctgtggcgcacggcatcgttgccgcagcacggtatccccgatatcgtgatgaccgatggcacctacggcgtgcgctatagcagtgcgcaaatagatggcaatgaaaagtggagcatggatgacttcatctcggtgattactcaaaccgccgaccaggccagcgccgacgagcctgtagcgaagggcggcagcgaagcgttgttcagcgcctcgctgccggccacctgttttccgaatggctccagtctggcctgtagctgggatgttgaactggtgcgggaaatgggggaagcgctaggacgcgagtgtcagcagatgggggtgggtattttattagggccgggaattaacattcggcgcacccctctggctggacgcggctatgaatactattctgaggacccggtcgtcagcggagatatcgccgcggcgctgattaacggcttacaggccgaaggcgtcggcgccagccttaaacattttgctgccaataactccgagtatcggcgtaccgaaatggattcgattattgaggagcgggcgctgcgtgaaatctatctcgccggatttcaacgagcgatcgccaaatcccagccctggacggtgatgtcttcttataaccgtcttaatggcgttcaaacatctcaggatccgttcttactgacccaggtactgcgtgatgaatggggatatgacggcctggtgatgtccgactggtacggtattaaagatcgcccggcatcgctgcttgccggcaatgacttggctatgccggaaacccgccgggacaaacaaaccctgctggcggcaatctcctgcggcgaggttccgatgtcggtagtcgaccgggcttgtctgcgaatgctggaactggtcgataaagtacaacgacatcgccggccgcaaacgcgtgctgactttgccgcacatcatgcgttatcgcagcgtttagcggcagaatccattgtattgctgaaaaatgaagacaacctgctgccgctgaagccacacaaaactccgcgtatagcggtgatcggtaaacccgctcaggagccggttattcagggctcaggttgtgccaccacggttccgtatttactcgaccgcccactggatgagattttcgatcttgccggggatgactttaaggtcacgtgggcgccgggcgtgccagacgacaaccaaagcgacgagcaggctctggcgcagacgcgcgatgtcgccggggccgccgatgtagcagtggtttttgtcagcacggcggtcggtgaggatggcgagaatggcgatcgccaggatctgaatattctcccgcgcacgaacggttgatccgtgaggtcgctgcggtacaaccaaatgtggtggtggtgttggccaacagcgatgcggtggtgatgccatggcttggcgaatgccgggcgctgctggaaaccttcttcgccggacaggggatggggcgtgccgttgctgaaattctattcggtaaatgtaacccctgcggtaagctgaccgtcacggtgccaaatacgctcgaagagacgcctgcctggctgcagtacccgggtgaaaacctgcgccatcattatggcgagggtttatttgtcggttatcgctattacgataaacgccgtctttctccgcgtttcccgtttggctttgggctgagctatacccaattcagttatgccaatcttgcgctttccgcatcgcggcttgccgaaggcgaaaccctgcgtgtcgcctttgatttaacgaataccggcgattgcgaaggcaaggagattgtgcaactgtacgttacggccccgaagggggagctgatccgcgaggttcgcgcgctgaaagcctttaccaaagtgtcgttgctggcgggagaaacgcggcgtgtcgaactcgtgctgcccgtcgctgatttagcctgctaccatccggggctggcggattggctggtgaccccagggcagtggcaaatctacgtgggcgcctcgtctcgcgatcttcccttaatggcaagcgttcagattgattgccctgcgcgctacgtaccgctgcgcgacgacaattctctccagcagcttattcaacagccggaagcctttgcccgtgtagtggcgctgatatcggcgaaaagcagggtagcgccagaactggttcgtgaaaagcttattcgcctggcgccggatctgttctgtggtttgctgattgcattgactgaattcctggcgctggatatcgatcgtgatgaactcaatgccgtgctggcgggtcattaataaacaaaagttcaggaggtaatccgtgttcccgttttcagtgacgcatccccgtcagatgacacaaagcgggcagccggcgaccggtagcggctacgagctgatcgccttcgacgctgagaaactcaacgtctttgccgccgaggtgcgctactgcgaacctcactggcacccggcgccggagcttatcaccgtccttcatggcggtttcacgctggccgtcggccagcgggagtggcaattgcgcgcgggcgatatgctgtatatcaacgcggaggaagtgcattcactcagcgcggagatgcccggtagccaactggtcaccgtgcagttttcgccaggtctgtttgatgaaatgcatccctctccgcggctggagtggtgtaccgccgggcgtactgcgcagagcgcggattggcaggtgcgccagcggctaacggcgctactgcaacagttagtcgataaccgtacgccattccagcgtatcgcggcgatatatttgctgcttgatgcattggtgacagcagggaatccgcaggagcgtgaggagagctcgctacgcgaagagtcgatgattaaaaaaggcattgactatattaatctgcattacgatcggccactgacgttaagcgaagtggccgagcacagcggcatgagctattcgtggttttcccgtctgtttaagcgggtgagtcgttacaactttaaagagtatctaaccctggtgcggctgaacaaggcccgcaatctactgcgcgatacacgtacgccgatcaccgaaattagccatagctgcggttttcaggagcacaaatacctgatagccgcctttaacaaatactgcggactgacgccgaccgagtaccgcaaacgctttgtttcgcggcaaaacgtcctcgaccagcaactggcactcggcgaggactgtttatgcctgccattaaacggccaactgctggcccgactggcgcttagtaatcaatccccatctgcgctttgaccccggcgtcaaaggcgtgcttcaccgggcgcagctcgctgacggtgtcggctatctcgataatctcgcggtggcagccgcggccggtaatcatcaccgtttgatgcgctggacggttgcgtagcgccgtcagcacctcttccagcggcagatagtcataggccaccatgtaggtcagttcatccagtagtaccaaatccaggctgtcgtcggcgagcattcggcgcccgtgctgccagacatcgaggcaggcggcggtatcgctgtcgcgattttgcgtatcccaggtaaagccggtggccataacctgaaactcgacgccgtgcggctccagcaaattacgctcgccgttaggccaggtgcctttgatgaattgcaccacgccggcttttttgccgtgtccaaccgcgcgggtgacggtaccgaaggcggcggtggttttgcctttgccgttaccggtaaataccatgatcagcccgcgttcttgctgggcggcggcgacccgcgcatcgactttgtctttaactcgctgctgacgctcgcgatagcgttgatcgctcattgggagatccctggtttacgccccggctgggcatcaaaggtcataccggttttacgccggctatcgtcgcccatcagccataaatagaccggcatgatatcagccggggttttcagcttttgcggatcttcggtcgggaaagcgctggcgcgcattttggtgcgcgtcccgccaggattaatacaatttacccgcagatgacggctttggtactcttcggccaggacctgcatcatcccttcggtagcgaatttagaggccgcgtaagcgccccagttggcgcggccctggcggccaacgctggaagaggtaaacaccagcgagccggaatcggacttgagtaataaaggaagaagggcctgggtgagcataaacgtgccgttaacgttcacctgcatcacctgttgccatacttcaggatcctgctggtccatcggacagacgtcgccaagcaggccggcattgtgcagtacgccgtcaaggcgcgggtagtgaatcgcgattttctgcgccagttgctggcactcctgcggcgtgcaggtcaacaggtcgagagtgaaccagcgtgccgcaataccgccagcctgttcaatttcttgcgcgacgccgcgcagcttctcttcattgcggccgaccagtaccacgcttgcgctgtagcgcgcataggtgagggcggcttcacggccgatgccgtcgctggcgccggtgaccagaatgatacggtctttaagtaggtgatattgcggttgatagtgcacggcgactcctctgctggcctgcttatggccacatcttattcggtatcttacttttgcgctttatgcctcaaacgattgatgattgcaatcagtcaaagggaaactcttcgcagaattaatatcttgcaacgatttcattgcgacaaaaaaaacgggaatgcgcctcgcagcgcacggaaagcgcagagacttgatgataaaggctgatgtacactgtgcgccaacgtcagtgctttacacaaggtgaaaacgtggaattacttgctcaatacggcttatttttagccaaggctgcgactatcgtcgtcgccattgcggttatcgccgccattatcgttaatctgactcagcgtaagaagcagcgcggcgagctgcgggtaacgaatcttagcgagcaatataaggagatgaaagaagagctggcggtggcgctgctggatggcccgcagcaaaagctctggcataaagcgcagaagaaaaagcataagcaggaagccaaagaggccaaagcgcgggcaaaattgggtaccgcggaacccagcggcaaggcgcgtgtctgggtgctggatttcaaaggtagtatggatgctcacgaggtaagcggcctgcgcgaagaaattacggcggtgctggcttcggcgaaggcgcgcgaccaggtggtggtgcgtctggaaagccctggcggggtggttcacggctatggcctggctgcttcgcagctgcagcgcttacgtgataaacagatcccactgacggtcgcggtcgataaggtcgctgccagcggcggctatatgatggcctgcgtggcgaacaaaatcgtctgcgcgccgtttgctatccttggctcgattggtgtagtggcgcagatccccaacatcaatcgctttctgaaaaacaaagacatcgatattgaactccataccgccgggcaatataaacgcacgttaaccatgttgggcgagaacaccgaggaaggtcggcagaagttccgcgaagatctcaatgaaacccatcagctttttaaagaattcgtacatcagatgcgcccgtcgctggatatcgaaaaggtggcgaccggcgaacactggtacggcgtgcaggcgctggaaaaagggctggcggatgcggtacagaccagcgatgaactgctgcttagcatgatggaaaaccacgaagtcattagcgtgcgttatcagcaacgtaagaaattgctcgatcgcgttaccggtagcgcggcagaaagcgcggaccgtctattacttcgctggtggcagcgtgggcaaaagccctaatgtaagataaaacaacgcgaggctgatacctcgcgttgctgtttctggcttacgtcgagagccgggccattatcagccggcgattaatcaaccaggtgatatttatcagacaactcatgagcgagatacttgaacatgttaaataccgcggtgctcttcgccgtcggtaaaccttgctcatcaagataaaactcgccgctgaacaccaaaaccccgttacgctgaacgacgttggtggcttcaattccggctaacgtatcttcatgatcgcgaatgagttggttggcaatttcaagtaacgcctggcgttcgatgggttgggttgtaccttgcataacggactcctgtagttcttcgccggtagtctacgccgcgagagggcaacgggcaaattttccattgattgtgcaggggtaattgcaactggctaagaaacatcactttactggcggagttggcttttgcatgctaataaagttgcgtaacgaattttatcaggtacagtgtgacgctttcagcgatctggcaacagatttgcttgacattcggccaaaaattcttcgtgctatgcaacctggctcgcgaaagccagtaaactcagctatctggttttatggatgtgaaactgggcgtgcagagggttgatatccatcgacgtggccgcaacatatcaggcacgtcgctagtggatggtgaatcaatgtgcgatgtattcctggatgaattaaattaggtaaaggtgaatatgggtaaagctctcgttatcgttgagtccccggcaaaagccaaaacgatcaataagtatctgggtaatgactacgtggtgaaatccagcgtcggtcatatccgcgatttgccgaccagtggctcagcttccaaaaagagcgccgactctacctccaccaaaggggctaaaaagcctaaaaaggatgaacgtggcgctctggtcaaccgcatgggcgtggacccatggcatgactggaatgcgcattatgaagtacttccgggtaaagaaaaggtagtttcagaactcaaacagttggcggaaaaagccgaccacatctatctcgcaaccgaccttgaccgcgaaggggaagccattgcctggcacctgcgggaagttatcggtggtgatgagcaacggtacagccgcgtggtgttcaacgaaatcaccaaaaacgcgattcgtcaggcttttgagaagccgggcgagctgaatatcgatcgtgttaatgcccagcaggcgcgtcgctttatggaccgcgtggtggggtatatggtatctccactgctgtggaaaaaaattgctcgcggtctgtccgctggccgcgtgcagtctgtcgcagtccgcctggttgttgaacgcgaacgcgaaattaaagccttcgttccggaagagttctgggagatcgacgccagtaccactacaccgggcggcgacgcgttaccgctgcaggtgactcacaagaatgacaagccgttccgtccggttaaccgcgacgaaaccatggctgctgtcgcgctgctggaaaaagcgcgctatagcgtgctggagcgcgaagataagccgaccagcagcaagccgggcgcgccgtttattacctccacgctgcaacaggccgccagtactcgtcttggcttcggcgtgaagaaaaccatgatgatggcccagcgtctgtatgaagccggccatataacctacatgcgtaccgactcaaccaacctgagtcaggatgcgctgaacatggttcgcggctatatcagcgataacttcggcaaaaaatacctgcctgaaagcgcgaatcagtacgccagcaaagaaaattcgcaggaagcgcacgaagcgattcgtccttctgacgtgaacgtgatggcggaatcgctgaaagacatggaagccgatgcgcagaaattgtatcaactgatttggcgtcagttcgtcgcctgtcagatgaccccggcaaaatacgactcaaccaccctgacggtacaggctggcgagttcaaactgaaagcccgcggacgtacgctgcgctttgacggctggacgaaagtgatgccagcgctgcgtaaaggcgatgaagaccgtacgttaccggtggtcaatcagggcgacaacctgagcctggtggaactgaccccagcgcagcacttcaccaaaccgcctgcgcgtttcagcgaagcctcgctggtgaaagagctggaaaaacgcggcattggtcgtccgtccacttatgcgtcgatcatttcgaccatccaggaccgcggctatgtacgtgccgagaaccgtcgtttttacgctgaaaaaatgggtgaaatcgtcaccgaccgtctggaagagaacttccgcgatctgatgaactacgattttaccgcccagatggaagatcgcctcgatcaggtggccaatcatcaggccgagtggaaacaggtactggataacttctttggcgatttcacttcccagctacaaacggctgagaaggatcctgaagaaggcggtatgcagccgaacccaatggtgctgaccagcatcgactgtccgacctgcgggcgtaaaatgggcattcgtaccgccagtaccggggtattcctcggttgctctggctacgctttgtcgccgaaagaacgttgcaaaaccaccattaacctggtgccggaaaacgaagttctcaacgtgctggaaggcgatgatgccgaaaccaacgcgctgcgcgctaaacgtcgctgccagaaatgcggcaccgcgatggacagctaccttatcgatccgaagcgtaaactgcatgtctgcggcaacaacccgacctgcgatggctacgagattgaagagggcgagttccgtattaaaggttatgacggccctatcgtggagtgtgagaaatgtggctccgaaatgcacctgaaaatggggcgttttggtaagtacatggcttgtaccaacgacgaatgtaaaaatacgcgtaagatcctgcgtaatggcgaagtggctccaccgaaggaagatccggtgcctttaccggaattgccatgcgagaagtccgacgcttacttcgtcctgcgcgatggcgcggcgggtgttttcctggcggcaaacaccttcccgaaatcacgtgaaacgcgtgcgccattagtggaagagttgtaccgcttccgcgaccgtttgcctgaaaagctgcgctatctggccgatgcgccgcagcaggatcccgaaggcaataaaacgctggtacgctttagtcgcaaaactaagcaacagtacgtctcctcagaaaaagagggtaaagcgaccggctggtccgccttctttatcgacggtaaatggaccgaagcgaaaaagtaaccttctgaatgggtcgccatgcggcccattctctcaccgattttccttgcattaccgcctcgcctctctcgctttataaccgacttattattttttgttaccatctatacacggtagatataaatgatatagtggttatagcgaatcacttttttattatcaaatcgtcttatacatcatcggtttcaggacgcgttgtggtgccgcagggaatgtctggcattttgcccccagcaggcagcagtctgaacgtaatgtgtattaagcggattcatttgacgcgtttacggatatcagccatgaaactacagcaactccgctacatcgttgaggttgttaaccataacctgaatgtctcctctaccgccgaaggcttgtatacttcgcagccaggcatcagcaagcaggtgcgcatgctggaagatgagttagggattcagatatttgcccgcagcggtaagcatttaactcaggtcactccagccgggcaggaaattattcgcatcgcgcgcgaagtgctgtctaaagttgaggccattaaatccgtggcaggggagcacacctggccggataaaggctcattgtacgtcgccactacccatacgcaggcgcgttacgcgctgcctggggtgattaagggctttattgagcgttatcctcgggtctctttgcatatgcatcaggggtcaccgacgcagattgcagaagcggtttcgaagggcaatgccgactttgcgattgctactgaagcgctgcatctgtacgacgatttggtgatgctgccgtgctaccactggaaccgttcaattgtggtgaccccggatcacccgctcgcttctaaaggttcggtgagcattgaagagctggcgcagtacccgctggtgacttatacctttggcttcaccggacgttccgaactggataccgcgtttaatcgcgccgggcttactccgcgtatagtcttcacggcgactgatgccgatgttatcaaaacctatgtgcgcttagggcttggcgttggggtcattgccagtatggcggtcgatccggtgtccgatccggacctggtaaaacttgatgccaatggtattttcagccatagcaccaccaagataggcttccgccgaagcaccttcctcagaagttatatgtatgattttattcaacgtttcgcgccgcatttgacgcgggacgtggtagatacggccgtggcgctacgttcgaatgaagacatagaagcgatgttcaaagatattaaactgccggaaaaataatcgcattgctaaatggcatttcctccaggaagtgccattttctattatggaccttatcagaacttataaacctcgttgaaatcacatttctgcgtatttcacttcattactttttcattatacccgctgcgatcaaaataacggttaaaagccttttccctgttcctgaattagctggatctattttatatatcttattaagatttatctgtacctgatgattttagcaattggtggtgatgaaatgataaacaatatcgattatacaaagctcgcgatgtcataccaacatgacaaagcggaaatcgatccaacgctgcgcagtcaggtctggggctcactactggtggggcttagcgttttctggtgcatcgttgcattattcatctggattattagctaaagcagtttatcagagaaagttatatttcacttttgtgacaaaaggaggttggtgaaattagcacgcggaatagtgaaacactgtggaagaaattattttccgacttttcagctttaaatgttaatccatcctgagctaatcatgcatatccgtgattagctctttttctattcccgctcagtgaacaggtttggaacttacttaccctcatcaaatatatccgcgctgtaatactattctcgtcaaaatttctgaactgtacggttttgtcaattttagcaatttgagttgttatcaaagtgttatgctaagtttgtgttatctttaataaagaccctgaggagttcagggcatgcatccctgtgataaaggaggagctatgtcgtcaacactacgagcagccagtaaggatacgctacaggtcaaagacaaaacctaccattactacagcctggcgctggccgctaaacaactgggcgatctcacccgactgcccaaatccctcaaagttctgcttgaaaacctcctgcgctggcaggacggcgactcggtgacggaacaagatattcaggcgctggccggttggctggcgactgcgcacgccgaccgcgaaatcgcttatcgcccggcacgcgtgctgatgcaggatttcaccggcgtaccggcggtggtcgatttagccgctatgcgcgaagcggtaaaacgtctgggcggcgatacggcgaaagtgaatccgctctcgccagttgacctggtgattgaccactcggtgacggtggaccgttttggtaatgaaaacgcttttgaagacaacgtgcgtcttgaaatggagcggaaccacgagcgttatgctttcctgcgctggggcagcaggccttcagccgctttagcgtcgtgccgccgggaaccgggatttgccaccaggtgaaccttgaatatcttggccgtgccgtctggagcgaactgcagaatggcgaatgggtggcttacccggatacgctggtgggtaccgattcgcacaccaccatgatcaacggtctcggcgtattagggtggggcgtcggcgggattgaagcggaagccgcgatgcttggtcagccggtatccatgctcattcccgatgtcgttggattcaagctgaccgggaaactacgtgaagggatcaccgcgaccgacctggtgctgacagtgacccagatgctgcgtaaacacggtgtggttggcaagttcgtagaattctatggcgatggccttgactcattaccgctggccgaccgggcgaccattgcgaatatgtcgccggaatatggcgcgacctgcggattcttcccgatcgatgcagtgaccctcagctatatgcgcctgagcggacgcagcgaagagcaggtggcgttggttgaagcttatgccaaagcgcagggcatgtggcgccagacggggatgaacccgttttcagcagtacgttggcgctggatatgggaacggttgaggccagcctcgccgggccgaaacggccgcaggaccgtgtcgcgttgggcgatgtgccgaaagcgtttgccgccagcaacgaactggaagtgaatcaaacgcaaaaatcgcgtcagccggttgattatactctcaatgggcaacgctattcgctgccggaaggcgctgtggcgatagcggcaatcacctcctgcaccaatacctccaacccaagcgtgttgatggccgccggtctgctggctaagaacgcggttgagcgcggcctgaaaccgcagccgtgggtgaaagcctcgctggcgccgggttcgaaagtggtttccgattatctggcgcatgccgggttgacgccttatctcgatgaattgggctttaacctcgtggggtacggttgcacaacctgtatcggtaactccgggccgctgccggaacctatcgaagaggcaatcaaaaaaggtgaccttaccgtcggcgcagtgctctccggcaaccgcaacttcgaaggtcgtatccatccgctggtgaaaacaaactggctggcgtcgccgccactggttgtggcttatgcgctggctggcaatatgaacattgacctgacccgtgagccgctcggcatcggtaaagacggtaagccggtgttcctgaaggatatctggccgagcggcgaggagattgctcgcgcggtgcaacaggtttccactgagatgttccgtaaagagtatgccgaagtcttcgaaggtaccgaggagtggaaagctattcaggttgaccgttccgatacctatggctggcaggatgactctacctatattcgcctgtcgccattctttgatgagatgggcgttgagccgaaaccggtagaagatattcacggcgctcggatcctggcgatgctaggtgattcggtgaccaccgaccatatctctccggcaggaagtatcaaggcagacagccctgcaggacgctatttgcaggagcatggcgtggcgcgcggcgatttcaactcttatggttcacgacgcggtaaccacgaagtcatgatgcgcggcacctttgctaatatccgtatccgcaatgaaatggtgccgggcgtagaaggggcatgacgcgtcatttgccggacacgcagcctatcgccatctacgatgcggctatgctgtacaaagccgaaggtacgcctctggcggtgatcgcaggtaaagaatatggttcaggctccagccgcgactgggcggcgaagggaccgcgcctgttgggcgtgcgggtggtcattgccgagtccttcgagcgtattcaccgttccaaccttattggcatgggatattaccgttggagtttccacaaggcgtgacgcgtaaaacgctacggttgaccggcgaagagcgaatcgatatcagtaacctgcaggcgctgtatcctgcggcaacggttccagttacgattacccgcgccgatggacagcaggaggtcattcagtgtcgctgccgtatcgataccgccactgaacttacctactatcagaacgacggcattctgcattatgtgattcgtaatatgctgtaaaagaaagggccagcgaatgctggccctgattcattctggagctgatttatttattcagcagatgtcccatcttggctgccttggtatcgagataatgttcgtttttcgggttacgcccgacgatcagcggcacgcgctcgacgatattgatccccgcctcggtcagaatttcgactttcttcgggttgttggtcaacaggcgaacctgctcgacgccgagcagtttgaacatgtcggcacagagcgtaaagtcgcgctcatcggcggcaaagccgagctggtggttggcttcgacggtatcgtagccttgatcctgtagcgcgtaggcgcgaattttatttagcaaaccgatatttcggccttcctgacggtgatagagcaggatcccgcgcccctcttcagcgatgtgcgacagcgccgcttccagctgaaaaccgcaatcacaacgcagactaaaaagggcatcgcccgtcagacattctgagtgtacgcgagccagtaccggggcttgccccgaaatatcgccatacaccagcgcgacatgatcctgcccggttgccagttcttcaaagcccaccatcaggaaatcgccccagggggttggcagtttggcttctgccacacgtttaagctgcatgtgattctccagattctgacagcacctgaatgtgctttctgtttactactattttgccacaacgccgcgacgttctcctaattaccgacgaccgcctgcgcggaaagcgcacaaacgatctactttccgttatgatattcagaaggaaagagaaggagatacgatgctgttaattgccaaaaggaccgccatcggggcggcactcttgcttattatgcccgttatagtctggctctccggctggcagtggcagccaggccatgccccggccgtgttgaaaatgtggtactggatgactgaaaccgtcacccagccgtggggtataattacccacgtagcgctatttggctggtttctgtggtgtttacggtttcgtttgcgcgaagcgctggtgctgtttctcattctcggcgccgccatcctggcaggacaggggcttaaatcctggatcaaagaacgagtgcaggaaccacggccgtttgtgatttggttagaaagaacccaacaggttccggtggcgcaattctatgagttaaaacgtaaagaacgcgctaaactggtgcatgagcaattggctgaacaacagacaataccgggattcttgcgtaaacactggcaaaaagagaccggttttgcctttccgtccggccataccatgtttgccgccagttgggcgctgctggggtaggactgttgtggccgcgccggcgctgggtcactatcggtttgctgctggggtgggcgacggcagtcatgggcagccgcctggcgttgggcatgcactggccgcaggatcttatcgtggcgaccagcctttcctggctgctggttaccgcggcgacctggctcacgcagcgtttttgcggaccgttaaccccgcctgtcgaagaggcgacggacatcaaaaaacgtgcaacctgacgctgtttatgttgaatttcgcgacacctggccgcatatcatgacgagtgtcatgcttttccatttcaccactgcggtgaaaatgatactttatagggcttgaacgcgttttactcgcgcaacccacagaacgggaagtcatgtgaaatatttacttattttcttactggtgttagctatcttcgtcatctctgtgacgctgggtgcgcaaaacgaccaactggtcacgttcaactatttgctcgcgcagggtgaattccgcatctccacgttgctggcggtgttattcgctgccgggtttgcgattggctggctgatttgcggcctgttctggctgcgggttcgtgtatcgctggcgcgcgccgagcgtaaaattaaacgcctggagcagcagatcgcgccagtgaccgtagcgcctgctgatgccggcgtccctgcggtcaaggaataaccttctatgctggagttgttgtttctgcttcttcccgttgccgctgcctatggatggtatatggggcgcaggagcgcacaacagtccaaacaggacgatgctagtcgcctgtcgcgtgattacgtggccggggtcaacttcctgctgagcaatcagcaggataaagctgtggatctgttcctcgatatgttgaaagaggatactggcaccgttgaagcccacttgacgcttggcaacctgtttcgttcacgtggtgaagttgaccgcgccatccgcattcaccaaagcctgatggagagcgcctcgctcacctacgaccaacgtttgctcgccgtccaacagttgggccgtgattatatggccgccggcctgtacgatcgcgcggaagatatgttcaagcaactggtagatgaaaccgacttccgcctgggcgcgctacaacagttactgcaaatttatcaactgaccagcgattggcagtccgccattgaagttgccgaacggctggtaaaattgggcaaagaaaaacatcgcagcgacatcgccaatttttggtgtgaactggcgctacagcagatggctagcaacgatctcgataaagcgatgacgctgctgaagaaaggcgcgtctgcagaccgcaacagcgcccgcgtctctattatgatggggcgcgtgtggatggaaaaaggcgactacgcgaaagcggtagaaagtctggaacgggtgattggccaggataaagaactggtgggtgaaaccctggaaatgctgcagacctgttatcagcagttgggtaagcatgaagagtgggaagcgttcttgcgccgctgtgtagaagagaacaccggtgcgacggcggaactcatgctggcgcagattatcgagcagcaggaaggcgcggaagcggcgcaaagctatgtaactcgccagttggaacggcacccgacgatgcgcgtgttccacaaactgatggactaccatcttaatgaagcggaagaagggcgcgcgaaggcgagtctgggggttttgcgtaacatggttggtgaacaggtgcggagcaaaccgcgctaccgctgccagaagtgcggttttacttcccacaccctgtactggcactgcccgtcctgccgctcgtgggcgactatcaagccgattcgtggcctggatggtcaataacttctaaaaaaagccagactttagttacaacatacttatatgggttttaccgtacccacttctgttgccacgtacccgcttttgtctgcagacgggcaaaagcagcctgtcattttccccacttcgcaggtagaatgctgcccgtttaccttttttgcgccctggcggcgctcatccacaattaaggtccggtcatgacgtctactgctagctcttctcctcgcgttatcacatcctctcccgtcgttgttgcgcttgattatgataaccgtgacaaggcgttagcctttgttgatcgaatcgatccccgcgactgccggttgaaagtaggtaaggagatgtttacgctgctggggccgcagtttgttcgcgacctgcatcaacgcggctttgaagtgttcctcgacctgaaattccacgatattccgaataccaccgcacgtgcggtcgccgctgcagcggaactcggcgtatggatggtgaacgttcacgcctccggcggtgcgcgcatgatgacggctgcccgcgaggcgctgttgccgttcggaaaagaggcgccgttactgattgcggtcaccgtattaaccagtatggaagccagcgatttgcaggaccttggcatcacgctttctcctgccgatcatgccgctaaactggcggcgctaaccaagcgctgtggtctggacggcgtagtttgttccgcgcaggaagccgtccgctttaagcaggagttaggacaggaatttaagttagtcacgccagggatccgccctacaggcagcgatgctggcgaccagcgccgaatcatgaccccggaacaggcgcagcaggcgggggttgattatatggtcattggccggccggttacccagtctgccgatccggcagcaacgcttgccagtatcaacgcatcgctgaagcagggggcgtaatgagtgattcaaatagtcgcctggtttactccaccgatagcggccgtatcgatgagccgaaagcggcgccgcaacgcgcaaaaggtgatggcattgtgcgcattcaacgccagaccagcggacgcaaagggaagggcgtctgcctgattaccggcatcgatcttgatgacgacgcgctggcgaagctggccgctgagctgaaaaagaaatgcggctgcggcggttcactcaaggacggagtgattgaaattcagggtgataaacgcgacttgctgaaattactgctggaagccaaagggatgaaagtgaaattagcgggtggctaagataatctctacgaaataaacaacaaggccacggtatttaccgtggccttaattattggtagatgtgtgtgttagtaactacgaaattattattaatttaatgctcgaggtaattatttaccaacctgatggccaatgatgccgccaaccgctgcgccacccagagtacccagggtgctgccatcagttaataccgcgccgccaattgcacctgcacccgcgccgattgcggtgttacggtcacgtgcagaccagttggaacaagcgctcagagacattactacagtcacagccagtacagccgcagccatttttttggtcattgaagtcatcattttattctcctgaataatctattcatggatacaacttccttttaagcatagcaactggctaagacttaagggctattccatgaaacttaagttgcgcaggtgttgctctcatcacgcaggtgataatcacttcctgttatatcgctaataataattctacttattttaaaatttaacgtcaggtaaaaaatcttaattgcgggtcggaatactctcagacgcagaagggacgccaacgccattttatcgggcgctggcggaggcgatcaggcgggattaacaatatcgacggttaaaccgctctcggctagctgctggcggatagtgtcgttcaaattattgtcggtaatgatgcgattgaaacgggcaacaggacccagtggataaggatgcacaacgctgaatttcgagctgtcgctcagcacgatggcttcacactgtttttccagcaccgcgttaacgacatcggcgcgcatcatgtcgcggccggtaaagccggtttcgctctgccagccatcaacgccgataaatgccttgctaaagtgtacctgctggatgcactgacgggttagcgggccgaccatgctttcactgcgcttctgataaataccgcccagcagaatcacctcgcccggcgtttccttgagtaaatgcgcgatatagctgctcacggtgatgatggtgatatcgccgcgttccgccaatgtgcgagccagaagggcgtttgaactgccattttcgatgaacaccgtctctccggctgctaccagcgacgcggcgcgtgcggcaagttcacgcttaatggcaaagttggtcatcatccgggtttcgacatcttcgctatccagcggtacggcaaagccgtgggtacggcgcaggtagctttgtttttccagcgaattcagatcctggcgaatagtgacttcggagacaccggtcatcctggccagatcggctacgctcatacggcctttatcgatgaccatttgcaaaatactttgttgtcgggcgttcatagctacatcacagttagaggtctatatggcgcccagcaggcgttcagccatgctgggggacaggagtgaatcagatttcccacggcgctttcgattgccctgagtccttctctggctcgtcgtgagacaacgcctgcagctcggctttgaggatctccagattatggatcgccgagtgataatctccggcaaccagaatatccagcacggtatcgatacgttgggcgagcaggcgggcattcagatcagacatagcattatcctggttacaaaaatgaatgaaatcaatgatgcaaaaaacagttgcaaaagagaagcgaaaaaaacgcacatccttgcgcggctggcgatattcactcaaaacgagaaatgtatggcccctgggcaggggccataaaagcgttacgccgccggacgggcgatgacgctgcgggtttccatacggacttcagcgatagtcacgtcgataacatcggtgactttgtaaacgacttcacctttaatctgtacggttccgttctcctggctgcagaccagttcatcgcgcaccgcgtgcaggaaaggtgccgggataaaggcgacagcgccgttatcgaccagacgcacgcgcatgccgccgcggctgacatcaatgatttctgccgcgtagcgggtatcggttcccgctttatcgttgaggaagcgagcatacagccaatctgcgacgtcgcgttccgccatccggttcaaacgacggcgctccgccatctgcacggtgacatcatcctgcgggcgaccaatggtctcgcctttaatgacggcttttaacagacggtggttgatcatgtcgccgtatttacggattggcgaagtccaggtcgcgtaagcttccagaccaaggccaaaatgggggcccggctcggtactgatttcggcgaacgactggaagcgacgaatgcggctatcgaggaaaccggaaggctgagcatccagttcgcggcgcagtttacagaaaccgtcgagtgtcaggacttcctgcggatcaacgtgcacatcgtgcgtcttcagcagcgcggccagttgttcggtgttggccggatcgaaaccggtgtgcacgttatatacgccaaaacccaggttatctcgcagcacgcgtgccgcgcagatattagcggcgatcatagattcttcaacgatacggttggcgatgcggcgcggttcggcaacgatatccaggacttcacctttctcacccaacacgaagcgataatcagggcgatctttgaacaccagagcgtgggttttacgccattcgctgcgtcgctgacagacttcctgcagcagtttgatttgctgtgcgatagcgtcatcagcaggctgccaggcgccgatattttccagccagttggagacgtcgtcataagccagtttggctttagattcgatggtcgcggcgaagaattcgatattatcttcaatagcgccgtcagccgccagagtcatgcggcaggcgagtaccggacgcacttcgttggcgcgcagcgagcacaaatcgtcagacagctcgcgcggcaacatcgggatattaaagcccggcagatagttggtaaaggcgcggattttcgccgcgttatccagtttactgccctcggcaatccacgctgtcggatcggcgatagcgacggtcagcagcagtttaccgtcgtcggcgcgctcgacatacagcgcatcgtccatatcttcggtgctggcgctgtcgatggttacgaactcaagccccgtcagatcgcgacgttcaagtccttcatcaagcatctcggtggcaacgccattcggcgcttctttttccaggttatgacgcgccagcgtcacccaccacggcacgaaatgatcgtcgctaaaggtgatgaattgcgttaattcggcatagaaaccgcggtcgcctttcagcggatggcgacgcatttcagccaccgcccagtcaccctgtttaaagtcgtgttctacgccacgcgcggcgcggcaagggatggcgtctttcagcagcggatgatcaggaacgatagacagacgatcgtcttttttctggactttaccaacaaaacgggtcaggaaaggctcaaccagctcttccggctcggcgctttcacgttctttttcggtatggaccacggcgataatacgatcgccatgcatcacttttttcatttgcggcggcggaatgaagtagcttttttgcgagtcgacttcaaggaagccaaaacctttttccgtacctttaacgaccccttcaacgcgcggagtctgggaatgcaattgctgtttaagctgcgctagcagcgggttgtcctgaaacataattaggttttttcgtggctaaaagagcggctgacatttttacgcgaatatgcctgcctcagcaagcgctgtttcagcattttacgtcgcttgacgtaccacgccgagggcgattttaagccggtttagccagccgcagaggccgcaccacgtcagtagatcgatagcctcaacgcgggaaagcccatattccgtgaggggagttagctgcgcggcgctaaaacggtccggggcacgagtcaatagctgcgccgcctgtaggaatacgtgttccaaagaatggcttcgcgtccagtgctgaaccgttcgttcatcgccgcgcaatgcctgcaacaaggcgttatcgcctgtccagcgcgcggcccaggcgttaaaacaactgacgctgccattgattcgcgccgcgagtaacgccgccatttcgcttaagggttgcgcagaactatccagttcagtcagcagttgatgcagcagggctaacgtatcttcatcactcgccagaagaggggcgagaggcttcaggccgggatggcggttccatgcggcgagtctggcttgcctgtcgtcattagcgtaacgcaggtcggcatcatcgatatccggggaccactctcctgtcgcctcagtgaagtgttctgccggggcatcatcctgctgcggcataccgggaagccagcgtaccggttgtccgagcgcggcctgaaaagtagccaccgcgcgggcctgaaagcccacgaagccgataatctgattaattaacacgatgtcgcggctggtcagcccgacctcctcaagctggcggcgggagatctcgttgataaccgaaggagaactggctaactggcgggcgtactgggttatctgcgccagccgacgattactttctcgtgaggagtcagggcccggcaacggcgccagacgggcggcgtagtggttacacaaacgctgtacgccgtagacctgagcgacggtcagggcggtgctaagacggtcgtaggcgctgaaggtttgtaatcgggttaccgtgacgctgtccgggagaagtatctttgccaactgacgcgcgggcgccagccagcctttatgagggtggctgagatcggctgcgagtggcagatcgagcaaaaaacggtcatcaacgtcagcggcctccgggaccagaggaagaacctcgaccgggctattggttgactgggtctcgtgataccagtggtttttgccatacacgcggcgttgctccatgggcgttccttgttcggtaggtggcgaaccgccgtttcgcggtacctctatgcacaactatcctggcgtaaccctgaagcaggagaaaatattgatacgtactaataaatagcggattggaataacagaagagaagcgtaagcagagaaggaagagagatcctcctcaccggggtgaggaggatagggaacttatttcagttccagttcgttcatcgcagcgatgctgaaaccgccgtcaacgtgaacgacttcaccggagatgcccgcagacaggttagagcacaggaaggccgcgctgttgccgacgtcttcgatggtgacggtgcgacggatcggggtgaccgcttcgcagtgcgccagcattttacggaaatctttgataccggatgccgccagggtgcggatcggacctgcggagatagcgttaacgcgaataccttccggacccatcgcgttcgccatatagcgtacgttggcttccagggacgcttttgccagacccatcacgttatagttcgggatcgcgcgctcagcacccagataggagagggtcagcagcgcggagcccgggttcagcatcgagcggcaggctttcgccatcgccacgaagctgtaagcgctgatgtcgtgggcgattttgaaaccttcgcgggtgacggcattgacgtagtcgccatctaattggtcagccggcgcataaccgatagagtgcacgaaaccatcaaatttcggccatactttttcaagctcagtgaacagcgcggtgatgctttcgtcttcagccacgtcgcacggcagcacaatgttagaacccagcgcagcagcaaactcttctacgcggcctttcagtttttcgttctgataggtgaatgccagttcagccccttcacggtgcattgcttgcgcaataccgtaggcgatggacagtttactggccacgccagtgatcagaatgcgcttaccggaaagaaaacccatagctttaatccttatcgttattgcttatttttactctaacaatcaaacggttaacgttgttatttcaaaataactcaaatttagccgggaattatatcccactgaagaccccttgtgtcacgattttttgtgccgcctatcgcaacgcagcgcgtaatgataaatgcgctcactccagtatatcaccggataatcactgcgtttaacgccaaatcccgacgcgttaccgatatttctgcggttaacggcgcacgatcgtggtgagtaacagcagggcgtccgtcgtgagcggcgcgagttcgcccggcgtttgctgatgccagaaaatacccgattgcgcttcacattgccgttcaccaagttgccagcgcccctgtaatacccaagcgacgccttcgtcgccgggagtctgtatatcatcaacgacccgtacttcggcggcggcgcggttgcgctgggtcatgatattaaagtcgagaccaggttcgcggatcccttcgctacgcagtggccactcgccggcaaaagcccagggctgccaaagcgctaaagggtgatcgatatcttcgcctttcaggcgcagcggctgcccggtcagtagagtaatgacccggtcgacgccgggaaagcaggaaaacggaccatcattttgcagggtggcaatgctggctcgccataaaaaaggggcgtcaggagaggggacacagactatctcacgggtctcgcctgcgccatttttccacggcgtgacgggcagagtggatagttggacgggaacgatcattagcgttacacctcggtttagcgcggtatgcgcaggcgtttacctacgttattgttatggttttgttacttttggcaatacatataatttacatcttcatcacaaaaacaggatgcgtgcggtgcgagcagttgtcaatgcttgtatatacaggatcggtcagatggggagtgaataaataataatagcgaggtacctatgtcttctttttcatctacagacggacaatcaaaaagtaatgaggcaggattaaaggaaacgcggtcgatcgattacatcccgaacgcgagaggcatgggcatccgtttagccagtttaccctgtggtttggcggcaacctacaaattaccgctattgttaccggcgctttagccgtagtgctgggcggcgacgtggtgtggtcgctgataggtcttcttctcgggcaggtgctgggggcggcagtaatgtcgctgcatgcattgcagggaccacggcttggtttgccgcagatgataatcagccgcgcccagtttggcgtctttggcgcggtagtgccgctggtactggtctgcatcatgtatgttggcttctccgccagcggtaccgtactggccgggcaggcgatggcaaagctgttgaatatcagcaatgtcgctggaatgttgctattcagcgcgattattattgtcattgcggtactgggatataaggtgattcataagctgggtaaactggcgagcattatcggcattctggccttcgtctatatgttcgttaccctgctgatgtcggcggatctcacggccctggcgcaaaataatcatttctccttgccgatgttcctgctggcggtgtcactgtcatcgtcgtggcaaatcgctttctgcccgtatgtgtccgactattcgcgctacctgccacgcaatgtatcggcaactaagacgttttgttcggtgtttttcggcaccgtgttgggaacgcagacttcgatgacgctgggggtgtttaccgctgcgattgccggcagcgctttccccggtcatgaggtgagttatctggtgggattaggtaaaagccaggtgatggcgatggtaatctactttgctatctgctttggcaaaatcaccttcacgacgcttaacgcctacggcagttttatgtctctgaccaccattgtttccggttttcgtcgccagacggctttgtcgcagaaatgccgcgttgctttcgtcgtcctgatggtggcggcttcatgtattatcgcgctgctcagcgagccggctttcttaaagcactttacccattttctgttattcctgctggcctttttcgttccctggagcgccatcagcctgaccgattactacattatttctaaaggcgcggtcgatattccggcacttagcgacccgcatcagcgctatggtttctggaacatgtatgccattaccatttatatcattggcgtactgattcaactgccgtttattgagaacccgctgttccatggttcgctgacgtggatattcgccggcaatgatgtgtcatggattatcggctgggtaggtaccggatggttgtattatgcgctgcgccgctttgaccgccgaccattaccggcgcagagcgtgtttccgcagtgataaatagcaggggcggctattatgccgcccctgaaggaaggttaacgctatttaccatcttttcgccaggcgtcggcagtcagcgcctcgccgaaatggccggcgatcagccgcttggtgagttcgtggagcggcgaggccagcacatcggcggtgctgccgcgttcgaccacttcaccctcatgcattaccagcacctgatcgctgatatgcttcatcatccccagatgctgggtgacatagatgtaggatattccctgtttttcctgcagttccagcatcaggttgattagctgcgagcgcatcgacatatccaacgaggccagcgcctcatcgcagataatcactttcggacgcaggatcaaggcgcgagcaagccccaggcgctgtttttgccccggcgccagcatatgcggatagtagctgacgtggtccggtagcaagcccaccatgcgcatcgtctcgataatctgcttttcccgggcttctggttcaagatcggtattgagacgcagcgggaaatcgaggatctgcgaaatacgctgacgcgggttaagcgaggtcgagggatcctgaaaaatcatgcgaatacgctggctgcggaatgagtagtcgccaaactccagcggatggtcatcaatcaacagttcgccggtggtcggctcgaccatcccggccagcattttagccagcgttgatttaccggagccgttttcaccaataattgccagcgtctgacgctcgcgcagggtgaagctgagcggcttcaccgcctctaccgtctggcgatggaaccaaccggtgcgatagcgaaaggtcttactcagattgcgaacttccagcaatgtttcgaccatttcactctttctccatattcagcgggaaatgacaggcgtacagatggttacgcgcgccggtcaaacgcggcgtgacgatacactcgcgttgcgcgtagggacaacgcggccccagccgacagccgatcggcagttgttccagcagcggaatggcgccgggcagggtattcagccggcttttatgcggcattgagctgccgaagtccgggatcgcgcgaatcagcgcctgagtgtaggggtgatgagggatggtcaccagctcttcgctcggcgcggtttccaccgtctgcccgcagtacatgacgttaattttatccgcccatttgctgagcatctgcatatcgtgactgatcagcaaaatagtggtgttgttattctggttgagccgggtcaacaggcgaataatctgcgcctgggtggtcggttccatggcgttagtgggttcatcagcaatcagcaggcgcggctggttggcaagcgcgatagcgatcataaccttttgacattcgccgtcggtcagctcataggggaagctgcgcataatatctttgtgatctttaatccccacccggtgcagcagttcgatagcgcggcgcttacgccagccaaagcgttgccaccagtggcctttaaaggtccagccggggatattttgcatcaactgcagaccaatacgctcggaaggatcgagacaggattgcggctcctggaagatcattgatacgttgtggccaaccagtttgcggcgctcgcggtttgacaggcgcagcagatcgatatcatcaaagcgcatacggtcggcggtgacccgccagttatctttggtgacgccacaaatcgcctttgcgattaagcttttgccggatcctgactcaccgaccagaccacggacttcaccttcagccagcgtcaggctgacccgatcgacggcctttacccagccctcgttggttttaaactcaatagtgagattacgaatatccagtaaaggcattattgaaccccggcaataattgcgcggcgaataccgtcgcccagcagattgacgagcagtacgcttatcatgatggccgcccccggcagcatgaccgtccagggggcgacgtaaatcagttccagcgcgtcgccgagcatggcgccccattccggggagggtagttgagcgccgaggtcgagaaaaccgagcgcggcaatgtcgaggatcgccattgacagcgcgcgggtaatttcggtgaccagcccggcggtaatattgggcagaaccgcaaaccagagaatattgagcgtggaagcgccgtcgaggcgggcggcaatcacgtactctttttccagttcatcgtgcaccatgctgtagaccgagcgcaccatgcgcggcagcagcgcgagccagacggcaaacatcgcatggctcagatgcggtccggcgaaagcgacgacgataatcgccagcagcagcgacggaatcgatagcagggtgtcgaggatatggttcattactgctgaacgtaaaccgtgggtggagccggcaatcacgccgagtaccaggccgaacagcgccgcgccgagcgtcactacaaaggcgccgccgacggtcggcgccgcgccgctgagtagtcgactcagtacgtcgcggccaaggtcgtcggtgccgagaaagaacgacacttcgccgtagcgcgaccatgaaggcggcaacagctggtagccgaggaactgctgatcgatgccatagggcgcaaaccagccgccgaatacgcacagcaacaccagcgcgccgcagccgtataaaccaatcatcgcggtggtatcgccgtagaatttacgccatacggtgcgcaatgcgccgggcgggcgcttttcgagatagacgctatcgtagggcataccattccttatgtttcagtgggttagccatggctcctaaaatatccgagatcacgttgacgataatgaccagcgcgccgatcaccatcactccggcggaaatcgccgcgtaatcctgctggcggatggcgttgatcagccagcgccccagccccggccagctgaagaccatttcggtaatcattgccagcgttagcatggtagagaactgcagacccagtcgcgggatcaccggcggtaaggcattgtgcaacacgtgacgatggagaatcgtcctgcgggtgacgccacgggtggccgcggctttaacatagttagtgtcgtagacttcacttgtgctgatacgcatcaggcgaatcacttctgtggtcggcgcgacggccagggtcaacaccggcagcaccatatgccgcgcggcgctgacgatcatctcatgacgccacggcgaatcagagagccaggcatcaatgagcgcgaagccggtcaccgtcttcacttcgtacaacagatcaaagcgcccggagaccgggaaccatcccagcgttagcgagaagaacagggtaaacagcaacgccagccaaaataccggaatagagaaccccaccagcgcgagggcgctaatcagcgtgtccggccatttattacgcataattccggcaatcatccccacaggaatgccgaccagcagcgcaaaaccaaacgccagaatgcacagctccatcgtggccgggaagaccacttttagctgttcggaaatcagctggccgttgatactggagacgccaaagtcccagtgcagaacccctttaaaccagaacagccaggcattccacagcgatgcgccctgcagcggcgcatgcggggtgaagtagctgaggctaaagccaataaaggtgagaaaaaacagcgtcacaagcaacagcagcaggcggcgcagagtaaaaataatcatggttttttcacctcttctttttcgcgcgacacgcctgcgaaggaggcattgccaaacggactcagcaccagtcctttcatatcataacgataggcctgcagccgcagcgaagaggccagcggcagcaccggtagttcgcgggcgagaatatgctgcgcctctttataggcttcgatgcgcgaggccaactgctgcgaaatcagcgctttctgtaatacctcatcaaactcgcggttgcaccagtgggcgaggttggtctgagaaccaatcgccgcgcagcttaacagcgggcggaagaagctatccgggtcattactgtcggtggcccagccggaaagcgttaaatcgtggctcatgtccatcaatcgcgcctcctggaagcggccttcaaccggaataataatcacttttacacccacctgcgccatatccgcctgtatcagctcggcggttttcaacgggctggggttccacgcctgggaactggtcggtacccatagttttaaggtcaaatcacttaagcccagcgcctgcaggcgacggcgtgcctccgcgggattgtattcagtaattttagcgtcgttatcataagcccacgaggcgcgcggcagcattgaggccgcggtttccgcggtgccgtagtagatcgattgcatcagacgctggttgttgatcgccagcgccagcgcgtggcgaacttccggattatccagcggcggcttggcggtattaaacgccagccaggcaatattcataccagggcgcagcgtcagacgcaggcgcggatcgtcgcgcaggatggtgagctggctggcggcgggccaggccagcacgtcgcattcaccggtcagcagttttgacagacggccggttccgccggaaccgagatccaccaccacctgcggcatcaagggtttgccgcgccagtaggccgcgtggcgctgcaggcggatgtactgcccggtgcgatactcttctagcttgaatggaccggtaccgacaggctggcggtcgagttgttcttcacggtcgcttttggtcaactgcgcggcatactccgccgacatgactgaagcatagtgtgttgccaggtgccacaggaatgaggcatccgggcgtttcaggcgaaactcgacggtatggttatccagcttacgcacgctttccacggtgtcggcgaactgcaggctatcaaaataggggaagctactgccgttaacgctgtgccacgggtcgtcgcggttaaagatgcgcccgaaggtgaagaggacatcatcagcgttcaaggcgcgggtcggtttaaaccagtcggtagtctggaactggactttatcgcgcagatggaagcggtaggtggcgccgttatcaagcacttcccagctttccgctagttcaggcaccagacggtaggtataaggatcgacatcgagcaggcgatcgtagatttgggcggcgagggtgtcgacaatcagaccgctgctcactttttgcgggttaaaggtatttacctgtccgctgacgcaatagacaaacccgctatcgcggatatcggcattagccggcagcgccggggccggtgcggcaaaagcctgcccgcacagcatcgaggctgccgctaaaagagaggacaatttcaggcgcatattttctttttggtcatagagcagagctctatcttattaatattaaatgacatttaccaccacctttatgacatcgagggggataatgcggtcaccggcagcgcatgttgtccagccagttggtcaaaatagtgtcggaaataaaccagtattatgaaacatggtatctttttattgccaatttctccagttagccatctgcaggcgttctggtatcggtgcgcgtgggctgcggggatcagagcggaaggagctgattgtagcgggcaatataatcttttggcgtgatctccagttctccgccgtcgcgatggatagcgacgaaggtacgcagtaccagcccgcttttacgctctgatatttcccagccttgttcgctgtaggcatcacgcgtggagcgcacgcagagatccgagaaaatcatcattaaagagagggctggcgcatgatgatttttcatggtgtggatcaaactggcatgggcggcatagcgggttagcgtatgagaattaaccggaatcacgtgaattttcagtccattgaatgatattgccgccgatgataattcacattaagacatcttaccagttacatattattaactcctcgcgttttcatacatgaagtaatggtgacaacgtcacgttttaattatccagcggtgtgaattcatataacgccagcgcattgctctgcagtgaatccacccgtagccagccatcatccaactgttcctcatgcacgctcagcgccggacgggcgtggtgctggagccagcgataatcctcttcgtccgggccgctgcggctacggaatgcctcaaacagcggaaatagcgcgccgtgaagttgatcgaacagatgctgtttgatgcgccagcgtccctccagcccttcaagccgcagggtatagggctggcgaaaccgctgagtaaaggcctcttcgctcgacagccaggggttgaaaatcaccgtattgcgcagcagcaactggtagtgcccgttatggcgcaataacaacaggtttttgtcattgattaagacttcgccgcgcagacgccgccacagccataatacccagtaaaccgggcgcggcagaccatgcaggtaatgcagcgccaggctggaggtatcaagtttaccgttgtcccgcgcctccccctgcagcccggaattaagccagaagcctgccagccacacctgttcggcaatgcccagcaggttatccatcaatagcgcgccgcggaaaaaacgcccgttggtatcgcgggtatcgccggtcaacgtattccacgatagcagccacagcggcaacgagagctgccgttgccgcagggcattatggatttggcgtaatttctgtcgcggatagctttcactggcggctagtttgctgctatcggcctgcgccaggtcaagcagttcgttggcatccgcctggcaggccagaaaatcggcctcgctgagcagcggggaattcagtagcggatcatcggcaataccgctttgcgggaaacgatgccagatacccatttgcggttgttgcaaggtggaagcgagcacttcgcgctgttgtcgccaggccaactgtcgcgccgcttcactggcctgtggcgaccagtgccagacaaaactccagctcgcaagcgtcgcgggtggaaagtgattggcggcgagttgtagaaaacgttgtaataaatcgcagcgggtggttaaaccggtatgtagtagcaccgtccagcctttctgcgccagccagctaaacagctgctgaagattgtaccaacaggcataacccgcgagcgtcgggtcgtcccagccttcaccaaacaggcggctactgagaaacggatcgtgaatatcgatgccgtagacggggagcgtctgctgcaactgctcaagctcgcggcggacatcttcgcggagtaaatcatcaagttcacgaacggtgacgatggtacgggtatggcgcaataacggcgcgcgcgctggcaactggcggatatccaccagccgtgtctgacgcggattgagcagcagcggcggcgtattatcgctgtttttttccgcctcattcaggcgggcgtaaagccgttcgactgcgaccggaaaccagacttcactggcgttgactcgcggacgagcggcggactgcggctgctgctggcgaaattgccgcggtgtgacgccatgctggcgcttaaacagatcgctcatgatgcgggtactggcgaagccgttatcctgtgccacctgctgaaccgagcggcgagtggttagcagttgctcggcggccttgccgagacgcagggcggtaatgtactgcacgaagctgacgccgacctctttatgaaacaggcgggaaagccaggcctccgagacaaactcaacggcggccatttcctgcagcgagatccgccgctgatagttggcttcgatgcgcgctactacgttgataattcgtcggctccagttttcggcgccgcggcgcaggctgggtacgatgggctgcgtaaagcgagtcgccagcagcagggcgatttcgctgagccagcggttggcctctaagcggtaacgcgactgatgattgaccagcccggctaccagcaactggcgcatcagctggcgcaggttatctgccgcatccatgttttcgccgttaacccgataatcacaggcaaaaaaatcgctatcaaggcgggtgagccaaccagcggcaaggttgaggatcatgaccgcattggcctctgcgccggtaatctgccagcgctggcggcggttaacgatcgccagttcatcaacgcgcatcggttgcggcgcttcgccgagttgcaacagcgcgctgccttccagcaaccatagcagcgttaatccgtcgctttccggcgggctgaggtggcgaatatcgcgaaccgtgaggctgaaatcgccgagatggtgttccatgcgccgctccttaaaagacaaaaaataacagggtgttttttgtcataacagaattgtatagaaaacagtcattaataattcgtcaatataaaacaaaaaagcgcattttaaagccgggtggggcgcataaactcgaaagtgtcgtgccaacacaacacaggaataataaaaatgacacatccattgattgaatctttgcaagttaatgaagcgcagtttgtggcgttacgtcgccgcttccaccaacagcccgagattggctttgaagaacataaaaccagcgatgaagtcgccaggctgcttactgagtgggggtatgaagtgcatcgcggcctcgccggtaccggcgtggtcgggacgctgaaagtcggcagcggcgaaaaacgtctgggtctgcgcgcggatatggatgcgctgccgatgcaggaaatgagcggtaaagcatgggcaagccaggtcgacgggcgttttcatggctgcggccatgacggccacacctccacgctgctgtatgcggcggaatatctggcgcgcacacgtcagtttaacggtacgctgcacttaattttccaaccggcagaagagctgctgtacggcggacgggtgatggtcgaagatggcctgttcacaaaattcccctgcgacgccatctttggcctgcataacatgccgggccagaaactgggcaaaatcggcctgcgcgacggcgcgatgatggcttcttccgatacgctgcatatcgaagtgaagggcgttggcggccatggcgcggtaccggaacataccgtcgatgcgacgctggttgcctgccacattaccctcgcgctgcaatcgatcgtttcacgcaacatcacgccatttgaacctgcggtagtcaccgtcggcagcattcaggctggttacgcgccgaacatcatcaacgataaagtgttgatgaagctgacggttcgtacccttaaccagcaggtgcgcgaaacggtgctgcagcgcattcacgatattgcggtcgctcaggcggaaagttttaacgccagcgctaccttaacccacgtcaacggcagcccggtattacgtaacgatccggcggctaatgaactggtccgtgaagtggcgacctcgctttttggcaaagaacaggttggtaccgtgaatccattcatgggcagcgaagatttcgcctttatgctggagagcaatcccaacggctgctacttcactatcggcgcgggtgatgaagccgaccgctgcatggtgcataacccgggatacgattttaacgatcaaatcctgcttaccggcgcggcgctatggtgcggcctgacggaacgctatctgcgttaacctatcgcaacggggggacccgattatgagttctgtatcgttaagcgaatctcagttcgtcggtagcgatcgcctgctggcgggtattgtgctcagcgtgctgacgttctggctgtttgcgcaatcggttatcaatgttgttccggcgatgaaaagcagcctcgatatttcactggagacgctaaccctggcggtgagtctcagcgccttattcagcggctgttttgtggtggccagcggcggactggcggataaattcggcagggtgcggatgacctatctcggcctggcgctgagtattatcggtagcgcgtttctcgcggcgtcgcaggggccggggctatttatcaccggccgtatcctgcaggggctctcggcggcctgcattatgccggcgacgttggcgctgatcaaaacctggtatgaaggtagggcgcggcagcgggcggtgagtttctgggtcattggttcctggggcggtagcgggctttgctcgtttgtcggcggcgcgattgccaccggtcttggctggcggtggatcttcgtgttctcgattgcggtggcgctgctggcgttgctgctgctgcgcggcacgccggagagccgcagcgccagcgccgatcggcataagctggatgtgggcggactattaagcctgatcgcgtcgctggtgctgcttaatctgtttatcagcaagggccatcaatggggctggagcagtggcttatcgctgtcgatgctgggcggcgcggtaattacgggtggtttgtttatccgtagcggtttgcgtaaaggtgaagcggcgctgatcgacttcgctttatttcgcaaccgggcctacggcgcggcggtgctgtcgaacttcatgcttaatggcgctatcggcaccatgatgatcaccagcatctggctgcagcaggggcatcatcttaccccgctggaaaccggcatgatgacgctgggctatctggtgacggtactggcgatgattcgcgtcggggaaaagctgctccagcgctacggcgcgcggttgccgatgatgaccgggccggtctttaccgccatcggcattttgctgatctcctgtaccttcctcgataagtcactgtatatcgggaccgtcttcttcagcaatattctgtttggcctcggtctcggctgttacgccacgccttcgaccgataccgccgtcgccaatgcgccggagaacaaaatcggcgtcgcgtcaggggtttataagatgggaagctcgcttggcggcgcgatgggtattgccgtgacggcgtcactttttgcgctattcctgccgttggggatggccagcgccgcgcaatacgcgctgtggtttaacgccgcgctgtgtttaggctcaatggtggtgagcgcggcgatgctgccgcgcgtcgctcatagctgatgcttcttcaacaaggcgcgtagctggtggtaggttagccccagcagctccgctgcctgcttttgattgtacttcgcctgctgcaggctcaactgcagcaggcttttttcttgctccagttgaaaggcgcgcaggtccaatggcaacgcgggaagcgcatgttcaacgaccggtgcaggcgcaggcgtcgcgctgttaaatgggttgataatgatattatccagctcgctatcactgctgccgtggcggtaaaccgaacgttcaaccacgtttttcagttcacgaatattgcctggccagcggtatgcgagcagcgtgtcgacggctcgctcgctaaagccgggaaacaggggaagccccagttcgcggcacatctgaatggcaaactggttggcaagcagcatgatatcgctttggcgctcgcgcaatggcggtagttgcacgacatcaaacgccagccggtcgagcaggtcggcgcggaaatgaccttcctcgaccattttgggcagatcggcattggtggcgcacaccagccgtacgttaacctgcagcggctggctgccgccgacgcgttcgagttcgccgtattcaattacccgcagcaatttttcctgcaccagcatcggcgcggtggccagctcatcgagaaacagcgtgccgccgtcggcacgttcaaagcgccccggatgccgtttgctggcgccggtaaaggcgccggcttcatgaccaaacaattcggaatcgagaaggttttcattcagcgccgcgcagttcagcgaaataaacggtccctgccagcgcgaagagagaaagtgcagtcggttggcaatgagctctttgccggtcccgcgttcgccgatcaccagcaccggtttatccagcggcgccagctgcgagacctgttcgagcacctccagaaagctgtttgcctcgccaagcaggttatccttgtattccgccatgatgaatttcgccattaagtagtgtgattcgccaagtcactgtagcaagcaggcggcgatatctcaaccaccttgtttaaaatcaataagataaaaagttggcacgccatttgtattaactactgcacaggccgctgcctgctatcagaactatgaggattgaaattatgggtattttttctcgctttgccgacatcgtgaacgccaatatcaactccctgctggagaaagcggaggatccgcagaagctggtccgtctgatgattcaggagatggaagatacattggttgaagtgcgttctacctccgcccgcgcgctggcggaaaagaaacagctgacccgccgtatcgaacaggcgcaggcgcagcaggtggaatggcaagaaaaggccgaactggccctgcgtaaagagaaagaagatctggcgcgtgcggcgctgatcgaaaaacagaagctgactgaccttatcggcagcctggaacacgaagcgcaactggtggatgaaaccctggcgcggatgaaaaaagagattggcgagctggagaataagctcagcgaaacccgcgctcgtcagcaggcgctgatgctgcgccatcaggcggccagctcttcgcgtgatgttcgccgccagctggatagcggtaaaatggatgaagcgatggcgcgttttgagtctttcgaacgccgtattgaccaaatggaagccgaggcggagagccatcgttttggcaaacaacaatcgctggatcagcagtttgccgagctgaaagcggatgatgaaatcagcgagcaactggcggcgctgaaagccaaaatgaatcagaataaccagtaatgcatattgcgcggcgcggtgttgcgccgcggctcaccacctgtaaggagtacacatgagcatgctttttcttgccatcccgctcacgctgtttgtgctgttcgtgttgccggtctggttatggctgcactacaacaatcgctcggcggatggggcgttaacccagaacgaacagcagcgcctgctgcagctgaccgatgacgcgaagcggatgcgtgaacgtattcaggcgctggaagcgattcttgatgcggaacatccgaactggagagacaaataatggccggattggattttaataaaaaactgtggcgcattccgcagcagggaatggttaaaggggtctgcgccggtatcgcgcagcatctggatgtgccggtaaagctggtgcgtttgataaccgtactggcgatgatttttggcctcttctttttcgtgctggtggcctacatcattctgactttcgcgctggatccgataccggatagcgaactgtacggcgagaaagggccgagcaatggcgatttactggccgcagtggatgctgaactggcttccggcgaacagcgcctgcgtgatatggagcgttatatcacctccgatactttcacgctgcgcagccgttttcgtcaactgtaaaacttttccatgtaaccaacgaggcaacgcatgaatatgaaatggcaacaggcagggcaaaaagtgaaaccgggtcttaagatagccggtaagctggtgctactgaccgcgctgcgatacggcccggcgggcgttgccggttgggcggtgaaatcggtggcgcgtcggccgctgaaaatgttactggcggtagcgcttgaaccgctgctcagtcggctggccaatcgttttgcccgcggcatgaaataattcctcaggggaggaataccggcgcgctttatattggccctgattatccccatctaaatagcttatcattaaacgacattccttctgggcataacggactggcgatgaagcgactcaaaactgaattcaatgcgctggtcaaccgcggggttgaccggcatttacgtcttgccgtgaccggactcagccgcagcggcaaaacggcttttatcaccgcgatggttaatcaactgctgaatatccacgccggggcgcggctgccgctgctgagcgcggcacgcgaagaacgtctgttgggcgtgaagcgggttccccagcgtgatttcggcattccgcgttttacttatgatgaaggactggcgcagctttatggccagccgccggcatggccaacgccaacccgtggggtgagcgaaatccgccttgcgctgcgctatcgctctaacgactctctgctgcgtcatttcaaagatacctcaaccctgtatctggaaatcgtggattatccgggagaatggttgctcgacctgccaatgctggcgcaggattatttaagctggtcgcggcaaatgaccgggctgttgcaggggcagcgcgggagtggtctacccgctggcggcagttgtgcgatgggctcgatccgctggcgcccgccgacgaaacccggctggcggagatcgccgccgcctggaccgattatctgcacgcctgcaagcgcgaggggttacactttattcagccggggcgttttgtgcttcccggcgacatggcgggagctccggcgctgcagttcttcccctggccggatgtcgatgcgcttggcgaagccaggctggcgcaggcggacaaacacaccaatgccggaatgctgcgcgagcgcttcaaatactactgcgagaaagtagtgaaaggcttttataaagaccacttcctgcgctttgaccgccagattgtgttggtggattgtctgcagccgttaaatagcgggccgcaggcgtttaatgatatgcgtctggcgctgacccagttgatgcaaagcttccattacggtcagcgaacgctgttccgccgcctgttttcaccggttatcgacaagctactgtttgccgccactaaagccgatcacgtcaccgtcgatcagcacggcaacatggtgtcgctacttcagcaactgattcaggacgcctggcagaatgccgcctttgagggatcagcatggattgtctggggctggcgtccattcaggctacccagggcgggcttattgaggttaatggtgagaagatcccagcgctgcgtggcgatcgtctgagcgatgggcaaccgctcaccattttcccgggcgaggtgccggcgcggctgccgggtcaggccttctgggaacagcagggcttccagtttgagaacttccgcccgagagcgatggacgtcgataaaccgctgccgcatatacgcctcgacgcggcgctggaatttttgattggagataaattgcgatgagcgagccgataaaaccgcggatcgatttcgatggccctctggaaacggaaaagagtcagaccttaaaatcggcccgcgcctttgacgcggccgatgcgcaaaccttcgctccgatgctgcctgaaatggttgctgaagaggagggggccgccgaagcggtggtggaatcggtactgcgcccgaaacgcagcctgtggcggcggatggttagcgccgggctggcaatttttggcattagcgtggtggcgcagggcgtgcagtggacggtgacggcctggcagacccaggactgggttgcgctcggcggctgtgcggccggggcgctgattgtcggcgcgggcgtgggatcggtagcgaccgaatggcgtcgcctgtggcggctgcgccagcgcgcgcacgaacgcgatgaagcgcgggatctgatgcatagtcacgcggtgggcaaagggcgcgcgttctgtgagaaactggcgcagcaggccgggctggatcaatcgcatccggcgttgcagcgctggtatgcggcgatccatgaaacgcaaaacgatcgcgaagtggtgagcctgtacgcgcaactggtgcagccggtgctggacgcgcaggcgcggcgggaaattagccgctcggcggcggaatcgacgctgatgatcgccgtcagcccgctggcgctggtggatatggcgtttatcgcctggcgtaacctgcgattgattaaccgtatcgccaccctatacggtattgaacttggctattatagccgcctgcgtttattccgcctggtgttgctgaatatcgcctttgccggcgccagcgagctggtgcgcgaagtaggcatggactggatgtcgcaggatctggcggcccgcttatcggcgcgtgccgcacagggtatcggcgccggattgttgaccgcccgtctggggattaaggcgatggagctgtgtcgtccgctaccgtggatcgcggatgataaaccgcggctcggcgatttccgccgcgaactgatcggccagttaaaagagacgctgcagaaaagcaaaaccggcgcggagaaataacctcggcaagcgtaaatgccgggtggcggctgcgccttacccggcctacagcgctttgcgatttggtagcccggaaaaggcgcaacgcgccgcctccggtaaaacccttaaataaagtggtaaaccgataacagtatctacgtaaacgcagccaacgactaaccgcactccattgccagccactcactgaaggcgcgaaaacgcgggcgagaacggttttcttgcgggcaaatcagatcatagccaaatggcgacaccacctcttgagcgcttagcgccaccagtttgccggcggcaagcagcggctggatcaacgttttgcgccccatcaccacgcctaacccatttattgccatttcaatggcgatggaatgattgttcaccgcataataacgcccgtcaaagggtagagagtatccgctttgctggcaccataaccgccattcggcgaactgatcctgtacatcggtggattcagaggcatggatccagacgatcgccgcagaggcgctggggctaagcggttgctgctgctggcgatatgtcggcgagcagaccggtaacaggctttcgcccattaaccgctgctggtacaggtcgggatagcggctcgcgccgtagtaaatcgccagatccacccgctcctcgttaaaatccatcacccccgcgcgcacgcgaaactgcaggtttaaagccggccactgggcttgaaagcgggcaggcgcggcattaaccagagatgcgccagcgtcggcgcaataccgatatgcagcgtgccgcgcagatcctgttcgcgaatatcttcaatttcatcgttaatcgcccgcagcgagtggcttagcgtcgccagcagtcgtttaccttcttccgtcagcgccagtttacgcgtcaggcgaataaacaaacgaaaaccgatatgcatttccagcttgcggatccggtggctgacggcaccctgggtcaggttcatttcatgagcggcgagggtaaagctcagatggcgcgccgtgacctcaaaggtttgcagcagggcgagaatgctttgctgttcaagcatggtcatactccgttatgcattaatctggttcatgcatgaggctataaatttcgtttgttccgccagtttcgccgattttaaatagttataacttaactgaacagaggcataccatgtcaggactcaaaattgttgtgattggcggcggttccagctacaccccggagctcattgaaggtttgcttaaacgccaccatgagatgccggtcgcttcgctgtggctggtcgacattgaagaaggcaaagaaaaggtcgagattattgccgggctggcgcggcgtatgattgccaaagccggactggccattgaggtggtcgcgacccttgaccgtgagcgagcgctacgcgatgccgattttgtttgctcccagtttcgcgccggttgcctggatgctcgcattagcgatgaacgtatctcgctgaaatacggccttattggccaggaaaccaatggtctcggcggtttcgcgaacgcctgccggacgattcccgtcgcgctggagattgccgccgatatggaacggctgtgtcaggatgcctggctgctgaattttaccaacccatcggggatggtgactgaggctattttgcgccatagcaaaatcaaaaccgtcggcctgtgcaacgtgccggtgattatgcaaaaaggggtggcggaactgctggaatgcgccgatgaaaacgacttcattatgcaggtcgccgggctcaaccactttatctttgtgcgccagattctgcataaaggtaaagagtggctgccgcaggtaattgcgcagattaacgccgggcgggatccgctggtccctcgtaatatcccgccattccgctggccgccgcatttgctgcagggattagggatgatcccctgcgcctatctgcgctactactacatgaaagacgatttactgcgccaggaactggcggaggcggatggcgaaggcacccgcggcgaagtggtcaaaatgctggagaagcagttgttcgcgcagtatagcgatcccaatctggcggtgaaaccgaaagcgctggagggaagaggcgggcaatattattccgaagcggcctgcgaattaatgaacgctatccataacgataagcgcattatcatgcacgtcaatacccgcaataacggcgcgattaacggtctccctgatgactgtgccgtcgaagtgagttcactgatcaccgcttccgggccgcagccgctcaacgtcgcgccgttcccggaagatacgctgcgcctgctgcaactgatgaaatcctttgaacagttgactattgaggcggcaataaccggaaatcggcataccgcctggcgcgcgttggtgcttaatccgctgatcgtcagtggcgagaagctggagctggcgttgaatgaagtgattgcacataaccgcgcgttgatgccggccttccatcgctaacatgctttacccgataaatggccgaacgcacgttcggtcatttttgcttatgcccgcataactttacggcataaagcccatttttccgtcatactgtcaataattgttgacagctatcttcacgtaagcacatatctgtcctatcattcatccgtcattggcctttttagggtgaaaactcctatgcgtctggaagtcttttgtcaggaccgtcttggtctgacccgtgaattactcgatttgctggtgctgcgcggtattgacctgcgcggtatcgatatcgacccgattggccgaatctaccttaatttcgccgagctggagtttgccagtttcagtagtttaatggcggaaatccgccgtatctccggcgtaaccgatgttcgtaccgtggcgtggatgccgtcagaacgggaacatctggcgctgagcgcgctgctggtggcaatgccggaaccggttttgtcgctggatgccaaaggcaaagtagagcttgccaacccggccagttgccaactgtttggtcaaacccaggctcgattacgcagccatccggtggcgcagctcattactgatttcaacctgcagcgctggctggaaggcaacccgctggagtcgcataccgagcatgtggtcgttaatggccaaaactttatgctggaagtgacaccggtgtatctggaaggcgaacacgccgagcgtgtgctgaccggcgccgtggtgatgttgcgctccaccgtacgtatggggcgtcaactgcaaacgctgacgacccaggataccagcgcctttagccagatcctcgccgttggcccgaaaatgcgccacgttgttgaacaggcccgcaagctggcgatgctcagcgccccgttgctgattgtcggcgatacgggtaccggtaaagatctgctggcccatgcctgccatctggccagcccgcgcgcgagcaaaccttatctggcgctgaactgcggttcgattccggaaaacgcggtagagagcgagctattcggcgatgcgtcgcaggggaaaaaaggtttctttgagcaggccaacggcggctctgtgctgctggatgagatcggcgaaatgtcgcctggcatgcaaacgaagctgttgcgctttctcaacgacgggaccttccgtcgcgtcggtgaagatcacgaagtgcatgtcgatgtccgggttatctgcgcgacgcaaaaaaatctcgtcgagctggtgcaaaaaggactcttccgcgaagatctttattatcgtctgaatgtgctgacgctgaacctgccgccgctgcgcgattgtccgcaggacatcatgccgttgaccgaactgttcgtcgcgcgctttgccgatgagcagggtatcccgcggccaaaactctctgctgaccttaataccgtattgactcgctatagctggccgggcaacgtgcgtcagttgaaaaacgcagtataccgcgcgttaacccagctcgatggcttcgaactgcgcccgcaggacatcctgctgccagatcacgatgtgtcgtcgctgccggtgggtgaagaggcgatggaaggatcgctcgacgatattacccgccgctttgagcgttcggtattgactcagttatatcgcagctttcccagcacgcgtaaattagccaaacgtctcggcgtttcgcataccgcgattgctaacaagctgcgcgagtatggtctgagccagaagaaaggcgaagaataaatcaccggtgcggccggctcggcgcggccgcgattttcagcgttttttcagcgatatttctgtatatacttattttatttttctttttccgggaaggtgatggttggcgctgcaacgggattggcctcagtggatgatattactggcactctccgccgtgctctcctttgtgctgttccggctccatctccccgctgcgccgctgcttggcccactgatcgccggaattacccttagtctgcgcggcgccacgattcgtctccctcgtccattcttcatctccgctcaggctatcatcggttgtatgatcgcccgcgcgctaaccccgtctattttcgccgttctggccgccaactgggcgctggtgttgattatccttctttccactctggctatcagcgcgctgaccggctggctgctggtgcgttacagctcgctacccggagcaaccggcgcatggggaagctcgccgggcggcgcttcggcgatggtggtgatggcgcaagagtatggcgctgatgttcgtctggttgctctgatgcagtatctgcgggtactgttcgtggtcggcgcggcggtaatggtggtgcgtttcgcgctcggcggcgaggcgcaggagatgacccagcagatcgtttggttcccgccgctgacttttaatctaccgttaacgttgctattgactgcggtcgccggttggttggggttacgtttacgcatcccttccggggcaatgttgttaccgatgctggccggtgcgctggcgcagggtgaaggcgtgctgttgctggagctaccggaatggttactggtgctggcttataccgcgctcggctggacggttggcctgcagtttaatcgcgagatttttatgctggcgctgaagacgctaccgcaaatcatcgccgctatcctcggtttgatcgcgctgtgcgcgctgatggctttagcgttaacgcacctgctgccgctggattttctcaccgcctatctggcgaccagccccggtggtctggatacggtggcgataatcgccgtcggtacccgggcggatatgtcttttatcatggcgatgcaaacgctgcgcctgtttaccatattgctcacgggcccggccactgcgcggttaatttcgcgttatgcgccgcgcaaagaaaaaagcctccgttgaaggaggcttgataacagaaggggggcgattacgctttcagcgcagccagcgccgcatcgtaatccggctcttcggtgatttcgttaaccagttggctgtaaaccacctggtcgttttcatcgataacgacgactgcgcgtgcagccagaccagccagcgggcctgcggagatagcaacgccataatctgccaggaactgcggcgcgcgcagggtagacagggtgaccacattgctcaggccttctgcgccgcagaaacgggactgcgcgaacggcaggtcagcggagatgcacagcaccacggtgttgttcagctcagaagcaagttggttgaatttgcgaaccgatgccgcgcagacgccggtatcgatgcttgggaaaatattcagtactttacgtttaccagcgtattggctcagcgtgacgtcagagagatctttggcgaccagcgtaaacggctgcgccttcgcgccagcctgcggaatggagccctgaacagacactgggttaccctggaaatgtacggtttgcgacatggttatcttcctgtttacatatagttaacgtcgtaattagtgtatgacatcagccagcaacacggcaaactctatttaacatttacctaagaggcccagggaatgcgcaaccttcgagtttttgaagaatcatggccgctacatacgccgtttgttatctctcgcggcagccgcagcgaggccaaagtcgtggtggtggaaatagaagaggatggcgtaaaaggggtcggtgaatgtacgccttatccgcgctacggggaaagcattgcctcggtgatggcgcagattatgacgatcggcgagcagcttgagcgcggcgccacccgccagcaggtgcaacagctactgcctgcaggagctgcgcgcaatgccgtcgactgcgcgctgtgggatctggaggcgcgccgcgcggggaaaacgttgccgcagctgcttggcgtcaatctgccgcgcgaagtggtgacggcgcaaaccgtggtgatcggctcgccggaacagatggcggccagcgccgccgcgctgtgggagaaaggcgcgcggctgctgaaggtcaagctcgacgatcatttgattagcgagcggctggttgctattcgcgacgctgtgtcgcaggcgacgttgatcgttgatgctaacgaagcgtggcgtggcgaaggtctggcggcgcgctgtcagcttttggccgatctcggcgtagcgatgctggagcagccgttaccggccggcgcggatgaggcgttggaaaacttcattcatccgctgccgatctgcgccgatgagagctgtcatacgcgggaaagcctaccggcgctgcagggtcgctacgaaatggtcaacattaagttggataaaaccggtggtctgaccgaggcattgctgttggcgcaggaggctgaacggttgggttataagaggatgctgggctgtatgctttgtacttcacgggccatttccgccgcgctgccgctggcgccgttggcccgtttcgcggatctcgatggtccgacctggctggcggtggatgtggagccggcgctgcagttcagcaccggcatgcttcatctgtgagtgtgccagtgcagtaaatcggtcatcgccgcgaggtacttttctgtcgcttcgtcggcggagaccggcggaaattcggcggtaatgcacggcaggccgatatcggcgcaccagctgccaaaagagcccggcgtttcgtaaccgacgctgcccaccagcggtaaattaaaggctccggcgagccattgtcccagctcgctgtgaccggggtcctcaatgcaggccagaggatcgtggaaggagactacccacgccggatggatctggtggatcaactggcacagcgcctgggtttcgggctccgaaccgggtttttcacccgtcagcagaaccacgtcacgctcttcggctgcgctattccagcgatacaccgtttctcccgccttccagttagcggccgggaaatttcgattgagatcgataccgcgggcgttggcgcgtaaccctagctgacagccgtcagggttgaccgttaataccacgtgatggcgacgcaactccggttttagcgtgcgcaacgcgcaggagagcgtgacgatcgacgagttttcgtcgccgtgcgtgccggcgataatcagaccgctgcggctatctgccagcggagcggggaaccacagcagcggcgcgccgagatgcgactggccgtaacgttgcgtgcctggcgggaaagcgccgcgcaggggacaagggcgtgaaacgggcataggatatcctgtcatcaggttattgttagcagtgttgtagaaaagcgtcccggaatcaaacgctttccctctctggcgaaaaaactcgtcatgtcaattttctatcataagccgtttgcaatttcaggtggggaaacaaataattatcgctctgccagcactggtttgttcatttaaaaggggatctcatgaagtatcctgtcacattgacatgcggcgcgctgtggttagccagcgtttcttctcttgcctgggcggcggacgtgcctccgggaaccgtattagctgaaaaacagcagctggtacgccatataaaagacgagcccgcttcattagatcccgctaaagccgtcggcctgccggaaattcaggttatccgcgatttgttcgaagggctggtgaaccaggacgcgaagggcaatatcatacctggcgtggcgacccgctggcagagcaacgataaccgcgtctggacctttaccctgcgcgataacgcgcgctggtcagacggcaccccggtgacggcgcaggatttcgtctatagctggcagcggctggtggatccgaaaaccacctcgccatttgcctggtttgccgccttagcgggtatcagtaatgcgcaaaatattattgatggtaaagcagcgccggacactctcggtgtgacggcggtagatgaccacacgctgcgcgtacagctggaaaaacctctgccgtggttcagcaacctgaccgccagctttgcgttctacccggtgcagaaagccaacgtcgaaagcggcgctaactggacgcgcccgggcagccttatcggcaacggcgcctatgtgctgaaagaccgggtggtgaatgagaagctggtcgtcgtgccgaatacacaatactgggataacgccaaaacggtgattaagcaggtgactttcgtgccgattaaccaggagtcttcggcgaccaaacgttatctggcgggtgatattgatatcaccgaatccttcccgaaaaatatgtatcagaagctgctgaaggatattcccggacaggtctacacgccgccgcagttaggtacctattattacgccttcaatacccagaaagggccaaccgccgatgagcgcgtgcgtctggcgttaagcatgaccatcgaccggcggattatggcggagaagatcctcggcaccggtgagaaaccggcctggcggttcacccctgacgtcaccgcaggctttaccccgcagccttcgcagtttgagagcatgagccaggccgagcttaatgcccaggctaaagcgctgctatcggcggcaggatatggcccggaccgtccgctgaagctgacgctactgtacaacacgtcggaaaatcaccagaagatcgccatcgccgtggcgtcgatgtggaagaaaaaccttggtgtggatgtgaagctacaaaatcaggagtggaagacctatatcgatagccgcaataccggtaattttgacgttatccgcgcatcgtgggtaggggattacaacgagccgtcgaccttcctgtcgctgctcacatcgacccatagcggcaatatttcgcgctttaacgatccggcatacgataagatcctcgcccaggcggcgcaggaaacctcggaaaaagcgcgtaacgatgattacaatgcggcagagaaaatcatcatggccaaagcgcctattgcgccgatttatcagtataccaacggccgcctgatcaagccgtggttaaaaggatatccgatcaccaatccggaagatgtggcctacagccgtacgatgtatattgtgaagcactaatcggtaccggtttcctgataacgcaaggtaaccacggataagcccagagctggcgcggcttacagcgccagtttctccttcttaccattacccgccacagcagaaagcacgactcttctcacgctagatttgagcagaggataccgtcatgctgactgataccaagcttaaacaataaatcaataaaagcggtatgagggttttcatagtactagcctcctgcagcggcaggtgaattaaataacggttttaagccaggattcaatattttgagtcggcgtattattctgtacattccaggtgttactcatcggccaccacatgccgtctcctcgggcgaaggctgcgcgatagcgaagcatctggtcatccggatttaaatgcagtgcatcctgtaggtctggcagcgtcaatacgtttttggcaaaagtctgttttgtcacgcgttcaaccgtttctgccagttttccaaaagaggtcgtttcacccgcgacaaagaccacctcgttcgctatacgcggctggtgcaaataaatttcggtggtgagtcgaccaatatccgcaggtgatgtcacggtgatttgtgtttcccaatctccgagcgcattaatggttttttcggctaaattcaccacatcaaatgtcggttcgaagagaaaactggtaaacataccggttgaaataattacccattctgtcgcggtctgttcccgtagtagagtcctgacatcatactgctcgtcccaaacgggctgaccgctacctttgcctaccacatcgtaattcacgccaaactgccagggaaaatagcggctaacgccagcctccagtaccgcgcgggtaatctttatctgtgttcccgctccagcgacaaaccccatgcagttgataacggtatcaaaatccgcgaagtggttttttaacgcgtcaatcgtgctggcagcgacatcgacagagataaatttggcccctgtatcagccagtttttgatgagtatcagactgcaggttgccttgcttatcccgggagtcgggcgacacgataaccgaaacggcgccattgtgtttggtgaccgctggaatcagacacttcaacacggcagcccccagttgtcctgcgccaagcactaatactttttcacccgttttaacatcacgttctttcatattgatctccactttgttaaatcgcctgtttacttacagtagagaaagcttatgtcagtgaaaggcattcgataagacggcggacgcaggttagactgttcgcataaatgggataattaaagcaataaggcagggtggaaatatggataagctggcgtcaatgcaggtctatgtttgtgtagtcgatacccatagtttcgccagggcggcagaagtccttgggctgccgcgttcaacggtatcgcgggtcattaaggagctggagtcctggcttgggattcagcttttacagcgcaccacccgcaaactcagcgtaaccgcagatggacggcgttattacgacgagagcaaaagacttctggcggatatcgcaacgatggagtcttcattccccggccgttccgcacagcccaaaggccgttttaaagtgggaatgccgcagtcacttgcccggcattgtattatcccaaggcttccggcgtttctgcgtcagtatcccgaactggagttgctgctctgctcaagtgataacgtcgaagacatcattcaggaagggtatgactgcgtgattcgtaccggcaggatcgaggactcaacgacgctggtcgcgcgccctctcgcaaactttaggtgggctgttctggcctcgccagattatattgccgcccatggtaagccggataacgtcgacagcctggaaagacatcacgccgttggctacctgaaccaccgcaccgggcgtaccaccgactggttttttacgctggatgatggcgacgtcgcgatccgtatgaaagagacgttgatcgttgatgatactgacgcatatatccaggccggaatacaaggggtcgggttgattcgtgtcgccagctatcttgttgcgccctatctgcaaagcggagcgctcgttctctgtatggagaacctctcttttgatttaccgctttcgctggtctatccgcaaaaccgctatcttcctccgtcggtacgcgccttttatgactggagcagagcggtgctgcaccaacacggcgactgaggattaaaatcgcagcatggctgtttttagctgcgccattagccagttaagtgcggcatcctgcgcccggcgcttgtgacgcaaaatacacagcgtaaacgaggggtaattcaccggcgttgcgcatttcgacacaaaagcggagattgaacggcatatccatacgctgccaatagtttcgaccatcgtacgacctgcgacttttatggagttgttggtcatgccaggtttcgggcttgatgaggggcaattccacttctttatgcagcctgatggtgcgatgcaggttctcgcggtagaagacatcggcaaaattgtcgccgcgatttacgctcagccggagcgattcaaaggcaaaacatttgaaattgccagcgatgttgtcaccggcctgcagctacaggagctgttctcagcagcggcaggacggctgattacttattctcgtttttccgatgatgtgctgaccgcgaatcccttcctgcaaaagttgactgcgccggcggatgatggacggctggtagggcatgcctccctgtaggagatgcggcaactgaatccgcaacgcaatcctttgagtcctggctggcgggaaatgggcgtgatgctttcaaacgggcgctggtattctctgccagctgggagtttaaccggtaaatccttcacccggctccagccatgcggagccgggaagggttattgagacgataaaaacgacgtgtaatccatattctgcaaatcgtcggtcaggctggggccggtgggatgccagcccaactgttgacgcgtccaggccgatgaagcgcgtagattcatggcggcaaacatcgcgaaccagccaaaatgtgtttgtgcctcagaaggcgtgattgatatcagcggcagcctgagcttccccgcaaccacttccgcaatctgccggagagatacgccttcttctgcaacgccatggtagcgttttccgttttcaccatgctccagcaccagccggtacaatcttgcgacgtcgctgacgtgggccgccgaccagcggttgtcgccctcaccgatgcaggcaactgcgcctttttcaacagcgttctgaatgtatccggtgatgagcccttgacgggtggtgtcatggacctggggcaggcgtaccacccgcacattaaccccttcagcgagcagggcgttaccctcaatttcggaggcaacccggggattcatgttgtcaggtttaaactgatcttcccgcgccagggccgtgtcgccgtcgtcgccgataccggtgcccgacgtgatgataaagggccgatcgctgcctttcagcgcctggccgatggcgtgaataacccgttggtctttttcacaactatcgacaaaatggtgaaaatcatggtcaaacgcggtatggatgacggcatcggcatactgtactgctgtcacaatcgaatccggcgcttccagcgtaccgcgatgaacatcggcacccgcttttttgagcacctgtgcgctgttctccgagcgggcaaggccggtcacctggtgtccggctgtcagcagttctgtcaggatgcgggagccgataaagccgctggctccggtaagtaatactcgcatagcgtacctccagattagggttccgcaacagagtaacgctatagtcatatggtaaaagtagagacattatcagggtataaatcttaacaggataacggcgatgcaaacggcaatgcagtcactgggcgacttcctgcgggcgctacgtttgcgtctcgaacccaccgcgtttggctttgttgcgggcagacggcgtacgtccggattgcgccgcgaagaggtggcccaactcgcctgtatcagcccaacctggtacacctggcttgaacaggggcgcggcggcgcgccgtcgcgggaagtgcttaatcgcattgccagcgggttgcgtctgacttctctggaacgcgaacacctgtttattctggcgtttggtcatccgcccgacgcgaaatttaccatttctgccgatattacgccgcgtttacagcgggttctggatacgctcaccatcccggcgatcgtcaaaaccgtgacctgggatgtgattgcctggaatcaccccgctgcatgcgtattaacggattacggacaactgccgcgggaggaacgtaatgttctacgccgaatgtttaccgatcctgatgtacgccgcgcgcagagtgactggcaggtgatggcgcggctggtggttaacgcttttcgcgccgacgtagcgcgggcaggacaatctgcggagatcgacagtctggtgacggagctttcgcaacgaagccctgaatttgatgcctggtggcgcagcaacgacgttaccagccacggtgaaggggcaaaacgtatttatcacccgcaagctgggtcgatcgatcttgaattttcgacgtttatggtagagggccgacaggatctgaatatgatcgtttttaacccggctaatgaagagagccgccggaaaattgatgaacaggtaagacaattcctctcttacggcggcgagtcagtccgccatgataccgccatccacaaataattcgtctccttcgcgcccgtattggcctcgaaggttgatctgtttcttacagggatcggcgttcattgaggtcattttgcatccgtagcgttggctgtttttgtcaccaggatagcgtctgcaatcacgctgaatatcgttcgcggtattgcagcagcggtaattggcggtgcaatcaccatggtgtatggtgcagatgcaactgtaccttttggtggggtattgatgctgccaacaatgtcaaattccatggcaggtattatggcgttgatagttaatatagtagtaacagcaaccatctatgctgtcttcaaaaaagatgttcctcgcgatgttgttattagcaatgatcaagaagaggaagatatcaacttcgacgacattaagattaattaagtatatacataatagtatgctttaacacgatgtcgcgatcacaatgaattgtgataatagaatgttatcatttatgcgtcatatactatctgctgcattcttttttactggcatttatcagagttatttaaaaacatcatcaataatctgccagtatagtggtgaatcgaaaacttccacataataatcaatttgtatttatgaattcactgcataggtcaaatcagtaatgacagactaatcgtggtggcgtttccgtcctaaaatgatgttttaacatgacgggagccttttcgtggaatactcagttttaagcaacaacctcaaaatgccgatggtcggttttggcgtgtttaaggttaccgataaagaagagtgtaagcagtcggtgttatgcgctattcgcaccggttatcgccttattgataccgctgccgtctatgacaatgaagacgccgtgggcgaggcggttcatgaagctatcgctgaagggctgtgtacccgtgaggaattatttattacctcgaagctgtgggttcaggacatggccaacggcgatatggccaaagccggtattgaggcgtcgctgaaaaaatcgggcatggaatattttgatctctatttattgcatcaggccatgggcgattatttcagtgcctggcgcgcgctggaagaggcctatgaagccggtaaactgaaagccatcggcttgtccaacttctatgcgcatgtcttagtcaacttttgcgaaaccgtcagaattaaacctatggtcaatcaagtcgaactgcatccttactttgcgcaacccaccgcactggaaaccatgaagcattataacgttcagcctgaagcctgggcgccgttaggcggtgggagacataaaccctatgaagatgcaatgcttcaggggattgccgctgctcatcaaaaaaccattgctcaggttgtacttcgctggaacgtgcagcgcggtgtcacggtgattcctaaatccactcggcaggaacgtattgcagagaactttgctatctgggatttctcactgactgacagcgaaatggcgcaaatcagcgcactggatttaggctatgtgggtgaagcagtgaaacattttaatcctgaatttgttcgcggttgtctgggggttaaaaagcagtagaaaagttataacgagacggtggggaaacccaccgtcctgatataaatttaaatattgctaatccacagattttcgctttcttcttaccgggtcaatctgcggcaggttgactaaaaaagacgttcatcaaggggcatagctaactaattagcgcgtaattcacctgcttcccaactataaacatccgtgccaattaacgagtcgccaaactcttgataatcgaaatgataaaattcagcgctggcgccgtagcctgagtagtctactgccgcaagacctacaaatgcaccggtaaagaacccgccatagctttgcaggacatagtcatcggaaaggactgcggcatctaaaactaccggaatttgaataaaatcgacgccgtcaaaactatactcatagctataggtctgcttcctgactttcgtccgtaaccacacgtattcgacgtcgtcaggaatcttaattgcgttatctttcaggtacgaagtatattttccacgattgttctcggcgacctcgatgactctgccgttaatttcattccaggtaacaaaagcaaagctccagtggcgatcgttgtagtaattggttaatccggccatctgttggtaactgaaaggattaaaggcgactttaacctgcgcattaaaataaaaggcttgccagcggcgggcaatcaacgacagatcatgggtattcgctaatgaaccctggccgattaaggtgagctttccgtggcctgtggtacccattttttcgctaaaaggcacccgtagggtattccagttaagattaagcgctggcgtagtaaattcatcgtgctggctattatctttcgcgctttcggtataaatggcgtctttcgggccctcgacaaacgttttaccaccgtgaccgccttcaatacgcggccagccatcttcatcccaatatactttttggatggccgtttcccggccaagggtagaccagccgcgaggatcataaatagactcgcctggacgattccacggacgagcgcagagcgaagcataataccattcgccttcgggcgtcgaaaccaaagcgccgtgtccttgtttctggatatagctgtcaggggtatcaacgttagttaaaaatacctcgccaggctctgtttcgaagctgtcagcgtttaatgtcgtggaacgggctaccacctcctgatgagtaaaaactgtccccccctgagcggcaaagagatagtaataaccgttcagtttataaagatgcggcccctcaacgagcgccaccgaggtaccgcgatagatggtacgcgcggtttccggcattaattttaaagttgttgtatcaagttctgttaaggtaatcccatcaaaaggatggtggtactctcgatggtcccacgtctgttgcacgatatatttacggccatcatcgtcatggaaaagtgaagcatcaaaacccacgccatttagtttgattggcgaactccacgggccgcgaatatctgttgcggtggtcaggtaatttgtcatgtctttaaaggcaccttcggtgactttcacatcggtatacactaaccagaatttgccatccgcataagagagcgccggtgcccaaatgccgcctgaagacggattccccttcatatctaaaagggtagtggtcgacaatggcgacggcagaagattccagtgtttcagatcttttgattcatgtaaacgaacgccgggaaaccactcaaatgtcgagttggcgatatagtaggtgtcctcaacacggataatactagggtcggcattaaaaccacgtaatatagggttttggataagggacatattattacacctttataaatttaaagtttactctgtattggatttacacccgaatctcatcaagctggcggttaatgtcgctgacgtgtttgtctgagatgggataaatttgcataacgatcatcgatacaatcgctaaggctatggggatccaaaccgctgtcatcatgatcccatcgatagcactcgcgctttgttgcgcgccggtttcattgaatccatagacggccagcagccacagaggaattgcgccgccaatggtaaagccaatcttgaaaaatagtcccatgattgcgttaatgattgctgcatttcgcttaccggattttaattcgccataggcaataacttcaggaaccagtgcccacataaaaccggtggctgaggttaaaccccactgtttaatgaatgttgcgatgtaagcaagccacagcgcatcgtgcatgccttcgcgtgaccagatatacgttaataactcaccggcaataaacattcccagaaaaatgtggaagaagccttttttaccaaaaatcttttttagttttggccaaaatatggggaacgcaataccgggtatggaggcgacaagcccaacggcgcccatccattcggagtgaccaacaacatactgattgaaaaagccattaaccgtgttcataaagaacatgaaggtaaaggcgagcatgaaaaacaaaccgagaataacaagcgggcgattatttttgagttcgaggaacagatcggttgttttgacgtttgctgtctgttctgcggtcgcaacaacgcgttctttggtgaatttgtagcaaatgaaaagcgccactgcgcctaataacatataaacggagtaaacgccgaaccaggcataattcgcggagggatcggtatagttaccaagattgagttccaggccaaaaaaaccggtatcctttagactacgttcttttggtgaagccatttgcacgaacatcggaaacagggtatagaccagaagattagcgctattggccagcatcattcgcgtactggtcaatttatcaatcgattccggatcccttgtcagtgaggcattaagagaaccataaggaatattcaccagggaatagactaaatccagggctaaataaatgatgaaggcaaatgctacggaacctttaacgcctggaatgggcgcaaagagtaaagcggataggatcaccagtggcacccccgctcttaagagccagggacgatatttacccgccaaagacgtgcgtttatccacataggtaccaaccattggatcccaaaacacattgatgattcgcacaaaaagaaaaatgaatcctgccgttgccgtactgatcgtatttaccgtcaacatgtgaagagcaagaaagccgcctatcgtaccgaaaaccaggttttgcgcaaaatcgcccatcccgtagccaatacgttccccacgagttaacttatgatattcatcattgcgactttgcattatttttatacccattctgagcagactccggtttgttgtgtgagtgtgaaacactttctgacacaaatgatctcgaagaatctattacgtttttaaattaattaattatgtttttttacttctgtgatcctcaatgcaaaggccattcgacactatctatgtactctatatggattttctcgcattaaatatttgaaagtaatatttgcgagatggctcacatttgagtgttttctcaatcgctgagtgaaataacgtaattgagcaaccggtttatagaatacaggatgtgtcatagttgttacatttcttacactcaccaatgttgggggcatcatgcaatgttaggttaaacggaacactaccagtggttgtactcactatgtaatgatgctcacgcgatgaatctctgcggtgaagattttcgaacagccctaacgttaatttcaagtatggaggaaggattacgatatagcttaatacctctatagcggtacaaaataaaaataaattgttctcacagtagcgacatattctgcgtagccagagtgaggttgttattgtctgaatataattaaactcaattgagataatgatgacaatgattagaaaacttccattaactatggcggttatcgccgcattttctccgtttacctctgtaatagcccaagagtttacccaggagcagatcgacgccatcgtcgcgaaagcggttgataaagcgctggccgaccgccaggcgaaaatcgacgccgccgccaacaaaaaggtcgacgtgattactaacccggaaaccaccgccgcctcgccggatctggcgatccccttcggcctgaaatttagcggttacgcccgctatggcgcccacttccagaccggtgaccagaaatatgtcggcgtcgacggctcctataacggcgcctcggcgatcggccgtctcggcaacgaaagcaacggcggcgaattccagataacgaaagccttcaaaagcgcgcagggggccatctgggatctcaacgtcatgtttgaccactggagcgacgaggttaacctgaaaaaagcctacgtcggcgtcaccaacgtcctcgagtctaaccccaacgcctatatctgggccggccgcgacttccaccagcgcccgcaacaggggatcaacgactacttctggatgaaccacgacggccagggcgccggggtgaagaacttcgatattggcggtgtgcagttcgacgtggcggcggtgtcgcaggtgaaatcctgtagcccggaagtgatggccgacgaaaccaacccgtcgcgcatcacctgtaccggcagctccgataccggcgacaacggccactacgcgttgactaccaaaacccacaacatcaaagccggaccgatcgacgtcgaggtatacgccaactacggctttgactcaaaagcggtggacagcgacgcgcgcctcgatgcctggcagggcgggctggtgctgagccacaccaacgacagcggggtgaataaggtgatcctgcgctactccgacaactcggataacagcgtctacaacaaaaccgacgacctgaccacggtctacgccagcttcgagggcagccataagttcacccaacaggcgcagatcgagtatctgctggccttccacgactacgacaacggcaaggataatacggacaaccgtaaaaactacggcgcgatcgtccggccaatgtacttctggaacgacgtgcactcgacctggctggaagcgggctaccagcgcgttgactacgaccagggcggggataaccatggctggaagctgacgctgtcgcagaacatcgccatcggcatgggaccggagttccgcccgatgctgcgcttctatgttaccggcggtcaggtggataacgagcacaccgcgaaggtcaacgacacaagcgacgagcggctggattcgctgaacgtcggcggtatgtttgaggcctggttctgagggaatggtttttacgggaataccagactggtttatgccagtctggttgttttggcagctaaccattattttattaacgttactatttatagtttttttaataattcatttattaaggaagtggggtgatttcgactttgaaagttgaacttatgatatttaaatagtttctctctgtgattgagtgaattaaatattggttgtcgtgttgttctttcttgaattattggctgtcattatttcttcccggcgatattgatctgtgccaattaagtgacttgttatctctggatctgcgtacgcacgtgttgatatattgctccggtttctttaaacataacgctgtcaataaaacgaggtttactccacaatcattccttaaggaaaagggaccgctatggctgattcatttcaaaatgaggtgccgaaggcacgtatcaatttaaaattggcgttacacacaggggagcgcagaagaaagttgaactgccgcttaagttactcactgttggtgatttcagtaacgggaaagagcatcgtccattggcagagcgccagaaaatagatatcaataagaataatttcaatggcgtgctttcggaatttaatccggagatcaatctcaccgttgagaatacgctggcaggggataattcacaggacaatgttaaactgcgtttttccgatataaaagacttcgagcccgaacaggttgcccgacaaattcctcagcttcgtgccatgctggcgatgcgtaatttattacgcgacctcaaatcaaacctgctagataacgctactttcagaaaagagcttgagagaatccttaaggatccagcgctgtccagcgaattacgcgctgaaatgagtgcccttgccgggaagtaatcggcggccatcttttttaatggattaaccgggaatatgctgatgtccgtgaatactgaaacgaaccccgcgcaggggcataataccgtactgaacaaagaaagtgtttacgcctctctgtttgaaaaaatcaatctgagcccggcctccagcctgggcgatattaatgtctttcttgatgacgccgcgctatcagaggctacggcgggggaacgtctgaccgcggcgatgcaggtctttatggactgcattcgccaatccggccagcaggtggaaaaacttgataaaacccttatcgaccgccacatcgcggagctggattttcgtataagccgccagcttgatgcggtcatgcatcacccggcgttccagaaggtggaatccctgtggcgcggtctgaaacaactggtagataacaccgactatcgccagaacgtgaaaaccgaaatcctcgatgtatccaaagaggatttacgtcaggattttgaagatgcgccagagctgatacagagcggcctgtactggcatacttacaccgccgaatacgacacccccggcggcgaaccgatagcttcggtaatttcggcttacgagtttgacgccagcccacaggacatggcgctgttgcgcaatatttcgaaagtctccgcagcggcgcatatgccgtttataggcgccgtaggaccgaagtttttccttaaggattcaatggaagaagtggcggcgattaaagatattggcaactatttcgatcgcgctgagtacattaaatggaaatcgttccgcgataccgacgactctcgttatatcggcctggtcatgccgcgggtattgggccgtctgccgtatgggccggatacggttccggtgcgcagctttaactacgtcgagcaggtaaaaggcccggatcacgagaaatatctgtgggccagcgcctcattctccttcgcctcgaacatggtacacagctttattcaaaacggctggtgcgtgcaaatccgtggcccgcaggcgggcggcgcggtaaaagatctgcccatccacctgtatgacctcggcactggcaatcaggtaaaaatcccttccgaggtgatgatcccggaaacccgtgagttcgaattcgccaatctgggcttcattccgctgtcttattacaagaaccgtgactatgcctgcttcttctcggctaactcgacccaaaaaccggcgctgtacgacaccgcggatgcaaccgccaacagccgcatcaacgcccgcctgccgtacatctttctgctgtcgcgtatcgcgcactacctgaagctgatccagcgcgagaacatcggcaccactaaggatcgccgccttctggagctggagctcaatacctgggttcgtagcctggttacggaaatgaccggtcctggtgatgaattacaggcctcacatccgctgcgcgacgcgaaagtggaggtggaagatattgaggataatcctggcttctttcgcgtgaagctttatgcggttccgcatttccaggtggagggcatggacgtcaatttgtctttggttagccagatgccgaaagcaaaagggtaacacgcccgttgttaacaaagtcgtctggctcgacaggctacggcctgcctggcaccagacaacacacccgcggcatctcaggatgatgacgtgtcaaaaaataaaatggagtaattaacatggcaataccagtctatctgtggttgaaagacgacggcggcgcggacattaaaggttccgtggatgtgaaagaccgtgaaggcagcatcgaagtggtggcgcaggagcataacctgtacatcccgactgacaacaataccggaaagctaaccggcacgcgtatccacacgccgtttctgtttaccaaagaaatcgactcctcaagcccctatctctacaaggcggtgactaccggccagacgctgaagtctgccgagttcaagtggtacaaaatcaatgatgcaggtcaggaggtggaatacttcaacaccaaactggaaaacgtgaaggtggtgaaggtcaatccgctgatgcacgacatcaaaaacccagcctacgagaagcacagccacctcgagcagattgaactgcgctacgaaaaaatcacctggacttataaagacggcaacatcattcattccgattcatggaatgaacgaacgacagcctgacgtctgaagcaggcggttcgccgtctgctttctttgctaaacgcctgtgactgcaggcttttagcaaacaacaatcagcctgcccgattttgtgcgctttggtctcctgcatcttgggaagcggcgaggggcggtagcgtgtccggaatcgacaaagagagagactcatggaaaatccagccatcctgttacgccgtttaaactcatactgcgcccgcgccctggaaggcgccgcttcgctgtgtcaggcccgcgcgcatgcgcaaatccttcccgaacactggctgctaaaactactggagcagggcgaaggcgacctgaccgttctggcgcggcgttatgagtgggatatggacgctatctggcaggatctgctctcttttctggaaacgcttccgcgctcggtacatagccggccgcagctgtccagcagcacccagagcctgatgcaggaagcgtggctgcgggcttcactggcgggcgaaacctcgctacgcagtgttcatctgctgatggcgttagtcagcaatcctacgcgggtgcgctgtgacagtctgtggccgctattaacgttgggacaaacgcagcttgaacacctgcgcccgctattagatatgcagtctgatgagcgtccggaattacagccagaggaacttagccacgcaggcgatgtggagtttgtcgggcgcgcgatggaatcagccgctaaatccgctgagctgaaccctgcgctacagaacgcgctggataaattcaccgttgatatcaccgctcgtgcccgcgaaggcaaaatcgacccggtctttggccgcgagaacgacattcgtcaaatggtggacatcctgtcacgcaggagaaaaaacaacccaatactggttggcgaaccgggcgtcggcaagaccgcgctggtcgaagggctggcgctacgcatcgccgaaggtaatgtcccggacagcctgaggtcggtttcactgcgcgcgctggatctcggcttgctacaggctggggcgggcgtcaaaggcgaattcgaacagcggctgaagaacattattgaagcggtacaacagtcccccgtcccggtcctgctgtttatcgatgaagctcatactatcattggcgcgggcaatcaggccggtggcgcggatgccgccaatctgctgaagccggcgctggctcgcggagagttgcgtactatcgcggcgaccacctggagtgaatataagcagtattttgaacgcgatgccgcgctggaacgccgctttcagatggtcaaagtcgacgaaccggacgatgacacagcctgcctgatgctgcgtgggctgaaaactcgttatgccgaacatcacggagtacatatcaccgatgaagcgattcgcgccgcagttacactttcccgacgctaccttaccggtcgccagttgccggacaaagcggtagatttgcttgataccgcatcggcccgcattcgtatgggaattgacaccgtgccggagcctttgacgcggatgaaagcacaaatcacggcgctggaactggaaaaacaggcgctgttggatgatgccatggtcggtagcggtagcgacgaagcgcggctggcggcaatcgagcaggaagagtcacgtatcattttccagcttgacgaactggaaatacagtacggccaggaacggaagctgaccgggcaactgctggcctgtcgcgccgatctctctcgcctcaaggagatcggcgaattacagcaccaacttgacagcgtccagaagaacaaaccgttgctggggctggatgtcgatttacgtaccattgcaacggtgattgccgactggaccggggtaccactctcttcattgctgaaggacgagcagacggagctgctgagtctcgaattaaatctcggtaaacgggttgtggggcaaggtccggcgttaaatgccattgcccagcgtctgcgggccgccaaaaccggccttgcaccagaaaatggccctcagggcgtatttctgcttgtcgggccaagcggcaccgggaagaccgaaaccgcgctggcattagctgatgagctgttctgcggtgaaaagtcgcttattaccattaatctctctgaatatcaggagccgcatacggtgtctcaactgaaaggggcgccaccgggttatgtcggttacggccagggcggtattctcaccgaggcggtccgcaaacggccatatagcgtggtgctgcttgatgaagtggaaaaagcccaccgcgatgtgatgaatctgttctaccaggtgttcgaccgtggctttatgcgcgatggcgaaggacgcgaaatcgactttcgcaataccgtgatcctgatgacctcaaacctcggcagcgatccgctgatgcagatgctggaggagcagcctgaagcgacagaatccgatttgcaagaactgttgcggccggtgctgcggaaacattttcaaccagcgttgctcgcccgtttccagaccattatttaccggcccctcagccggccggcgatgcgcaacattatcggcatgaaactcggacaggtcagccagcgtttgtaccgccattacggtatgacaaccgatattgcagaaggcctgtacgacgcgttgactgacgcctgtttgctgccggataccggcgcgcgtaacgttgactgcctgcttaatcaacaaattcttccggtcgtgagccaacaactattgagtcatctggcagcagggctgcagccatgctatctggctctggattgggatgaagaagaggggatttcgctgatctttaaagcgggagaaaacgcgcctggcgtccgggaaggaaacgagtaatggcgtccattgaaaccctgatatctgcctgccaactgcaggtaaatgagttggagacgctggcgcagtcacatattgtcctgtgggaacgctggctgcagccgatcgcagatagggagcccgttggagaggagccgggttacgatgatgatttccagcaaatacgcgaggaagtgaataaaatttctggcgcagataccgaacgcattctggtgctggcggaaaaactgctgaccgccaccgctaaggatattcgtgtcgccacgtactacgcttgggcgagactacatcgcgatggcgaagcagggctggcggacgggttggcgttactggctggcttaatacagcgttacggtgtgcaacttcatcctcagcgggagcgcagtagaatcgcggcgctgaaatggctgtgcagcagtagaatactggacagcctgtcgcgatacccggaagtgactaaagaggggactggccgtattgccgcggcgttgtgggcgatagaaaagcgcctggcagacagggaaagtaaagaacggccccagcttaatagtctctatgccgcactggagtcgcgcgttttgaaatctggcggcatggatgccctggtaccacagagcgtcggtgaaccccctcgtacagcctcggtatctggagaggtacccgcgctgaaagatatttcctcgggccaggagctcctcgctcaggcacgcaccctggcgcaatacctgcgaaaccaacctgatggttggctcgccgctcaccgattgataaaaaatcttcgtcacgacaccctacaccagctaccgttgttgacggttgagggtaaaacccgcattgaaccgcctaaaccagaactacgggcgcagctcaaacggctttatctgcagcagaactggcgggagctgctggaggaggcggacagcctgttggtacgcggagcaaatcacctgtggctggatgtgcaatggtatctgcatcaggcattgatgagatcttcgcaggacgccgaggcggccattattcaggccgatctaaaagggctgctttcacggctaagagggttggaaacgctggcctttaacgatggtacgccattcgctgatgaagtgacgcttaactggatacagctgcaggtcatggatgaacctggcaattggcaggacgagcccgccgccactgcgtcaggtgagagcgatatcctgcaactggagccggaggcgctcgccctggccgatcgtgaggggaccgacgcagcgttaacgtggctgcaaaatcgtcctgatgctaacacccctcgccattgctggttgctgcgcctgctaatggcgcgtattgcagaacaaaacggtaaaaatgagcttgcgctgcacctgctgggtgagctggataagaaagccgcttgcgttacgctctcgcaatgggagcctgatttgctgtttgaggtgaaagcgcggcgattaaagctattacgcatgaaggccggacgtagcgaaacagaaaaaaaacgcctggaagcggaaatggaacagctgctcgcggggcttatagccattgagcctgcgcgtgcggcggtgctgtgcgattagtcaggagaaaaacaatgccacgcccctcactctacgacaccctgtttggtcatttctccggcggtctcgcgttgcattcggtcagtgaagaaaatcaggtcatattatcggtgctcgataacatgcagcgtatcctcaactgccgggctggcacgctggcgcatcttccggattacggtctgccggacatgacaaaaatcctccaggggatgccgggtaccgcgcaccagttgatgaccacgctgtccgcggtactactcaaatacgaaccgcgtttgaacagcatccgcgtggagatgctcaaacagttacagccaggcgaactgcgttatgccatcgacgcggaactgaaggacattggcctggtgcgctatggcacggaattcatgcctgagggcagggtgctccttcgtcatctgaaacaacaacagtacctgaatgctcgctccgctatttagctctcactttggttactcctatgacaacataccctgaacgccgcctgacaatcggcggcgacccgcgcacgatggctgattacgcgaagctgcgcgaagaaatgcacaaactcagtcacccggcgcgccccgacattgactggctatacgcagaacggctttgcctgtcattgtttgaccgtaacggtgtagagctgcagaccgcggcctggtatacgctcgcccgtacgcagctgaccgggttatccgggttgaatgaaggcctggctattctggaaacgctaattacccgtcagtggggaacctttggccacagccggtgcatgcaagaatggaaatcctctgcgggttgggtaaaaggctacagcaagtgctgcgtacgctgacgctgatctatgccgatctcaggttgatttatgaggcggaagcgcatctgaaaacgctggatgctgtgctacagcgtctggagttaaagcacgccagtcagtttgatgcgttgctcaatttgatgcataacgcggcggtacggctggagaatagcgatggcgtgaccagcgctgataccctaccgcgcggagtcgagatggagaatgcttccacccatttggatgagcgggttgagcgaacgaagtgggtttatattgcgccgccggaaacgctgccaaacgtgcaagtcggcaatgagcatcagatctctgaaaaacgatggcgaccttttatggccggtatgctgacgatgctaacactggccgcagcgacaggatggggtggcaggcgataaatacaccagacccggaacagcgtcaattcgctaacagtctggcaccattgccggcggtactttcgccagagcagttacgctccttttctcagcacccaccgtcagcagaccgtgggataaagcagacccgggagcagcttacacatctggctcaactcaagccgaattgggccatcgactatagcgagcaactgctacaacaggcacaagtactatggccggagcatgcaaaagcgttgtcctcgcagtggcggcaacagaacgtagccgccgcgttgtcggcggaaaacctcaccgggtggtatcagggaatgcttcaactgcagcaattaactcagcggctggatgccctggatgaacagaagggaaaatacctgacggtcagtgaactaaaatctgcggtgttcgccattacgcagtcacttaatcgaaccgtcccggttgaagagcagctacgccaactatcggcgatgacagaaggacaaatcagccgcgccgcgcagcagcaacaggcggaacagcacctgcagcaactgatagtctcttatgcactactgaaaagtaaaacggcggaatagcttcgcgtaagacgtaagggctggggcatatcgtagcgtagcgactccagccctggaaaaggtgtttaccgctgcagcacctcggcaaattttgctaaccattgcggatgggcgggccaggcgggggcggtgaccagattgccgtcaacgtgcgcctggtcgatgccaatatccgcataatgcccgccgctgagtcgaacttcgggagcgcaagccgggtaagcgctacaggtacggcctttaagaatacccgcggcggccagaagctgcgggccgtggcaaacggcggctataggtttatgcgcggcgtcgaaagcctgtaccagcttaatcacctgctcattcagacgtagatattcgggggcgcggccgccggggatcagcagggcgtcgtactcctgttctctggcgctggcaaaatcggcgttcagtacgaagcggtggccgggtttttcgctgtaggtctgagcgccgtcaaaatcatgaatcgccgtcataatataatcgcccttgctcttatccggacagacggcatcaacctgatggccgatcatctgtaatgcctgaaacggtaccatggtctcgtaatcttcagcgtaatcacccaccagcattaaaattttcttgcccatatccttgttcctccacgattaagatgaataagatatagactgccacaagaaagaaagcgaaccgtgagggcgctcaataatggttattgatgacatttggctgccgggatttaacccgagggaaatgcgttgccgcagccaacggccacggcaacaagaagcggtcagagttaatccacgttagtgaagtaatcgcgagcgaccgcttccacacgctttgcttccaggccggtcttttcgctgatcccggcgataaacggcttgaactgctcggtcatcacgtggccgccgtcccagtgggcgacgtagtaacggcactgatagcgataaaagtggagggtcttttctcctaacgtgtaatacatgacattctcctgtccagtgtgtcgggctgcgtccgcagaagctaagggcgtaccacaataatcaggtatttgattatatcctgctcccaaatgtggcaaatttccagcagccaattggcgatcgagacagattttcctcgggacggttatcagcacaagagaatataaagcggctgaagagtgcgacagccgccagggagaccttattgaagcccggccagttcgttggcggttaacgccagcttttgcacgccgccgctttctgatgaagcaacggctgcttccagcaccgccatcaccgccagcgcctgcagcggcggcaccgggttggcgactttacccagcagggcatcgcgaatctgaatatagtactggcgttgatcgcctttcggcgtggcgagcgtgtgcgtctgcaggttggcgtcgaacaacgtcatgctgtcgtcatcctggccccagctttcgctcccagggatgaccccagccagcagctggctctcctgctggtctgctttcagtttcacgacactgccgcgattgccgtggaccgtgaagcgcgagacgccgccggccaccagcatgctacagtgcaaaatcactttgtgctgcggatagttcagtactacatgcgcccagtcgttaatctccgcgccctggcgcagggtggcgatattgccctgtacagactgcggcaggccgaaaagttgtagcgtctggtcgatcaggtgcgggccgatgtcaaaccacaggccgctgcccggcacgttctgctcgcgccagcggacgcgaacttccgggcggaagcggtcgatgtgcgactcgaaatgcttaacctcgccaaccagtccctgctcgattgcctgcttgatgccgagataatcgctatcccaacggcgattgtggaataccgaaagcagtcgttgcttttcttcagccagcgcgatcagctcgcgcgcttcctgcatatcgagagtgaagggcttatccaccaccacgtgcttaccggcgttcaacgccagtcgagcaagcggggcgtgggtggcgttcggcgaagcgagtaccaccaggtcaacgcccggatgctgaatggcctcttccggcgaagcgattacagtgacatccggcagatcctgcttcactttagcttcatcgcgggaggcgacgatggcaagctttaccccttcgaccgagttaatgagcggcgcgtgaaacgttttgccgacaaatccatagccgatcagcgcaatgttaatgggtttacctgcgccggtgataactttatgcatgactttctccacgttattcagcgtcagcaatgctgacctgcattgaattgtcttcgccaagcgcgtgccatggcttgtcgaggaacagacgatcgatgagtttcagttcggcgaccaggtatggctcacagcgattaagtttcagatggtcagccaccagccagtgctcgacgctggctgccagcatggcgcgtttcacttccgcatccgcttcctggctggcgctaagcccttgttgcgcatggatcgcgcaggcgccgagaatggcgatatccgcgcggtaacgagaaagcagcgccagcgtggcgctaccggcgaacagccgctgccgcatatcccattttccgccaagtaaaaccaactctatatcgggccgttcgctaaatagttgggcaatatccagcgaaggggtgatgaccgtcagcggtccttttagatgagcggcgacggcaagtaccgtgctgccggcgtctaaaaatagcgttgctcccggtgggacctcacgggcgaccagcgcgccaaggcgttgtttagtctccagcagcagcgcgttgcgcccctggcgattcatggccggaagatcgagagcgatagcgccgccatggtttttctgcaccagtccgcgtttttccaggtcaccaagatcgcggcggacggtgtcgggcgagacctgcaatttttcaaccagttcgctgatgctaatttgaccgttttcactcagtagttcgagtaaaaactgttgtcgggcggttttatgcataatcgctgttcctgcaaaatactgcaacaacatgcataatacagcatggaatgagaatgtgaatcgcaaaaaacagcaaaaaatgggttgccagttaaaaggggagatggagcatcgctttttgggaagggggaccggttcagctcagcctgtagagcgttaaaccggtctattcaaaggtaatccgctcagcgcattacccagtgctgattaccgacctgttcgtagcgacgggtcggcggctgccagtctttatcgcgaaacggcgagggcagttcatcgttattggcttcacgcaacagatggcgacgagacggatcggttttcgggatcgctgcaatcagcttttgcgtatacgggtgctgcggattggcgaaaatggcctgccgcgggccaatttcgacgatttcaccgaggtacatcaccgctacccggtggctgatgcgttcaatcaccgccatatcatgcgagatgaacagaaaggcgattttcatcgttcgctgcagttcgataatcaggttgaccacctgcgccttgaccgacacatccagcgccgacactgactcgtcggcgataatcaccttgggattcatcgccagcgcgcgggcaatgcagatgcgctggcgctgaccacctgaaaattcatgcggatagcggttaagtaccgcgacgctgagccctactttttcaattaattcatgggcgcgggccagcgcctgctggcgggtggcaaggccattttccagcagcggttcaatcagcgtttcctggattttgagccgcggattcagactggcgaacggatcctgaaatatcatctggatatcctgacgcatccgcttttgctgctggcgcccggcttgcaggacgtcataaccatggagacgaacatgaccagattgtgcctggaccaggcggataagactgcgaccggtggtcgatttaccgcagcctgattcgcccaccagcgataacgtttcgccgggccataaatcaaagctgacgttttctacggcgtgaatatatcctgctaactgattaaaaaagccttttttaactggaaaacgggttaccaggtttttgaccgacagcacaggttcgttactggtcagactgagatccgcttctggcggataacgatgaatttccccggtttgcaggttcaccgatggaaatttacagggggtcgagcttacatccatttcacctgccgcgggtaccgaggccagcagcgcgcgggtatagggctgttgcggggcggcgaatagcgtcggcgtgtgctcgcattcgatggcgtcgccgcgaaacatcaccaacgtatcgtcggcggtttccgcgaccacgcccatatcatgggtaataaacagcaccgcggtattgttttctgcctgcagggttttaatcagatcgaggatttgcccctggatagtgacgtccagcgcggtagtgggttcatcggcgataagcagttttggcttcagggccaacgccatcgcgatcatcgcgcgctggcgcatcccgccggaaaactgatgcggatattcatcgaaacgctgtgcggcatgcggaatgcggactttttcaagcagggcgatggcctcctgcttcgcctggcgcgccgataagccctgatggcggataaagacttccgctatctgattaccgatggtaaatgccggattaagactggtcatcggctcctgaaaaatcatcgctacctcggcgccgcgtacgcgacgcatctcctcttcaggaagagcgagcagtgatttgccgccgagcaacacctgtccctcggtacggctatgccgggtagaaagcaggcgcataatggccatcgccgtcacgcttttgcctgagcccgattcgccgacaatcgccagcgtcttacctggataaaggctaaaactgatattacgcaccactttctgccagctatcgccgtggcggaatgagacgctcagattgtcgacggccagcactggcgcaggcgtttctcgcttcatgactcaggactccctggcaaagggcgcgcgggcggaaacccgcacctgtggggtgaattcgaggtcacgcgtaaatggccaggtcggggtcaacattcgcaggcgcgccacccgttcaatatcctgatcgacgaccccttccgagagcgccatcaggttcggattggccagcggcgccagttccggcgataaatagccggatttgaccaccagaattttcacctgccgcgggtctaaccccagcgcgctaaagtcagcaatgtcgtgatacggacgacgacggtcggccaccaccacggtaataccgccggtctgcaaaatcgcctgattggccgggcgctgcgggcctgccgccagcaagcctgtcacggtaaaacacgcgctcgcgctgacgcccgacggatcgagactggcgccgagcgtcaactgcaattctgcgccaatgccggcttcaaaggccgcacgcgtcgccggggcatcggtaatgccggccaccagggtattttgcgcctgctggcgtagcagttcggcgagcacatcgccgcgatcgccgacgcccccaccggttggattatcacctgaatccgccaggatcaccgggcccatggcgctggagatagcctgagcgacgcattcggcgacgctgcccgtccggcagccgaaaacaaaatcttcccgcgcgtcccaataggcctgtgccagtttcgcggcctgttgctccagtaccgcgcgatcggtgccggtaaaaatggccgcggcggtggcgcgcggttcatctgcccacacgtagccgaccattaatgagctatcgagtacgccgtctatctggtcgctgtttggcagcatggcgtagaggcttttcgccggctcatcctcagtactggttcgctctccaggcagtaacaccgggatgggcgcccaaacgacgcccgggcgcacgccgctttgcagactatccaccagcatactgaccgaacggcgcatggtctcttctatatcgatatgcggcgcggtgcgataggttgagaacatgtcgatggcgttaatgatgcgctgggtcacgttaccgtgtagatcgtagctgacggcaatcgggcagtcatcgccgacgcaggtgcgggcagcagcgatccagtcgccttcagcgtcttccataccttcaacgtacattgcgccgtgcatcgccaggtacaggccgtcgatcggcagttgcgcctgcagacggcttaagaattcggtcttgaattgttcgtaagtctcccgtgctaccgggccgccgggaatcgccctggtgtgcagcgtcggcagaaacgtcgccggataatcacgtaaaaactgaaagtggggcgcctgcagcagggcatcgcctctgacggtgcgaaactctgcttcatgagtcagtaccgggttaaacgtgctgcattcaatatgtattccaccaacggcaatgcgcatagggacctcgaaattatcctggaaagagaacgtgagtcagagcgacgctcgccgcggcgagcgcccagctatctggagccagcggacgatagataagcggcgttttgcccgccatccccggcagcaggttggtttcaatggcttgttgcatcacggtattcagtaaaccgttaaagctttccggctggtgggcaagcatgatcgccgccggatcgtgggtctggatttgatgtgaaatagccaaccctaaggcgtcaccggcccgatgcaggatctggatggcggcggtgtggcccttacgcgccatggcttccagttcatccagttggtcggtgttgataccggccatacgcgcctgttcaaagatggcggtgagagacgcgatggtgtcgagacagccacgtttcccgcagcgacaaggcgtgcctgccggcacgatggtgcaatgggctatttcgcctgcgccgccgtgggcgccgcgccagattcggttatagatgaccgccgcgctgccgatgccgctgccgtgcgatatcaccactgcgctctccagcttgcgtagatggccaaaagttttctcccagttcgccagtgcccgggtatcgttttcaataaataccgggatcccgccggtcgcgcggcttaacaattcagctagcggcacctgatgccagcccagcagcgcagactgtacgcagaccgcttgcgcggcgtccacaaaggcagacagggcaaaaccgataccgaccagccgttggcgctcaataagcgtatcgtttaacaaactgcggatttcacccgccagttgctggattacgtcggggatttcaagccgcggcatgagcagtcgctcggcgattttctcaccgctggcattcatcagtaccaacacaagctggttatcgattagcgagatgccgatggcgtaagcggcgtccggcgccagcgagagggtgaccgaagggcgtccctggccgccggaagcggccatatcgctctcctgtagcagaccatcagctagcatctctttcaccagcgcgccaatggccgctttactcatacccgtaaggcgggcgaggtcagcgcggctggcgccttcctcgctacagaccaaatgaatcaattgttggtggagtttgttcagcatagttactcagccataacgcttttttctgaacataatcgcgggctggcgctttagcaaccagtttattttcaaaaataactaaaccatcacatataagttaaatttattacctaattaagcgttattcatggctaatatcacatttatgggactctgttttgggtaaaaagaaaacctaatcgcaacataacagccacaactggcgacataacagacaggtaggggttaacggatgaaggcaattatgaataaatatcgacttgccattctggcaggcttactggcgactggcgggacgacggcgctgcaggcggcgacgctgaacgtgatgcaaaacgaacctccgcgtagcatggacccgggcgatcaaaccgcgacctttaccgatactgtattaaaaccaatgtacgaaggactggtagatttatcgccggatttcaagatagcgcccgcgctggccaccgcctggaaggttagcgatgacggtaaagtctggacgtttaccctgcgtaaaaacgtgactttccatgacggctcgccgttcaatgccgatgcggtggtggccaatatcgaacgacatatcgacccgaaaggcggtctggccgcgagttcgcggatgcgcaacgttatcgcttccgtgaagaagctcgatgataacaacgtcgagattacgctgaaaaaggtctatccctctttcctcaatctgttgaccggcggctcggcgaagatggtgagcccggcggcggcgaaagctggcaccattggccgtaaagcggacggtaccggcccgtacatgctgcaggagtataaaaccggtgaatatgtgctggagaagaaaaaccagaaatactggggcgagaatcacggcccggatgaaattaagtggacctggagctcggagccgtcggtaatgaacatggcgctgctttccggccaggtcgatgtgattaacccggtaccgccgcagtttggtcggcagttgaaaagcaacccgcaggtgaaactggagcaggggcagggggcgtcggtattctgggtggcgctcaacgttgagcaaaaaccgctgaacgatgtccgcgtgcgtcaggccctgaacctggcgaccgacaaagaagcgctgctgaaggcggtgatgtttggctttgcttctgccgccaactctccgctggcgccggtgaatgaaggatatgataaaaccctcaacgactatccgtgggatctcgataaagcgaaagcgctattaaaagaggccggttacccgcagggctttgagatgaacatcgccgtgcagggaccggatgcgcgtaccgcgcaaatcctgcaggcgatgtggggcaaagttggcgtcaagcttaatatccagcagatggagagcggcgtctggagcaaagcggcgtttgccccggcggcggaaaagttggccaaccgcaccgatgcggtgctggcctcctggtcttccgggcttaatgggtctgatttgcagctgcgcccgctgtactattcgcagagcgccgcgccggccggggctaaccttggcttctatcgcaacccgcaggtggatgagctgttagacaaagcggcgaccaccatggatgacaacgcgcgtattgccgaatatgtggcggcgcaaaaggccattatgcaggacgcgccgcatgtgatgctctacttccaggacgatctgtacgccacccgcgccaccattaaaggcgtgcggatggagccgggcggcgaaattatcgttaccgaagcgcaaaaaccgtaaagctggggtcagggtggagttgttatgaaagcttatgtgattaaaaaactgctttctttgccgctgatcctactgggggcatcactgattgtctttctggcgatcagaatgctccccggtgacccggcccgcctgatggccgggccgcaggccacccaggatgatgtcagccgtatgcatacgcgcctcggtctggacgatccgctggcggtgcagtatggccatttcgttagcggaatgctgaagggggattttggcacttcgctgaagtccggtcagccggtctccgccgaaatgagcgaacgggttccttatactttaggcctggcgctgctggcgtggatgatggcggtgatcctcggtattcccatggggatgtgcgcggccatttaccgcaatcatgtagccgatcatgtgctgatgctggtggcgattgccggcgcgtcgatagccaatttctggctggcgctgatcgctatggataccttttcggtgaagctgggctggctgccgctattgggtgccgaaggctggaaaagctatatcctgccgtcggtttgcctggggattttcccgatggcggtgatgtcgcggatgacccgctcgagtatggttgacgtgttaggcgaggattatatccgcaccgcgcgggccaaagggctggcgccgtttcaggtctatttcaagcatgcgctgcgcaatgcgctgatccccatcgtgacgattatcgcactgaacttcggcagcctgatcggcggcgcggtggtgaccgagtcggtgtttaactggcctgggataggccgctatctggttgattcggtacgctatcgcgattatcccgtcatccagggagtgacgatgattacggtagcaagcgtggtggtgatgaacctggttggcgagatgattatcgccagaatcaacccgaaaataaggtttgactgatatgtcggaaatttcactcgccaaatcgcgcagcggtgtgctcagcggcctgcgctgggggatggagcatccctcgctgaccctcggcggcatcatcgtcgccttaatcgtggtatgtgccgtcttcgcgccgtggttaagccattacgatccctatgcgcaggacctgctgaatattctctccgcgccgtcggccgaccactggctgggcaccgatgactatggccgcgatatcttttcccgcaccatttatggcgccaggatctcgctgattgaggtggtggtcagcgtagcgctgtcgctactgatggggctacctctgggcattatcgccgccctgtgcggtaaaactgtcgaccacctgattatgtgggtgatggatgtcattttcgcttttcccggcatcgtgctggcgatcctgctggtcagcgtcctcggcgcagggttgatgaatatgctgttggcgatcgctatcttctccgtgccggtttatgcgcgcctcagccgtaaccttaccttgggcatcaagaatatggagtacatggaagctgcgcgggcgttgggaattggctatcgccgacagataattcactacattctgcgtaatacgctggggccgattaccgtgcaggcgacattgaccggcggctcggtgatcctggccgcggcttcgctctccttcctcggcatgggcgtgcaaccgccgatgccggagtggggacaatgatgagcgacgggcgtaacttccttggcatcagcctggggatttcgctatggccggggctggcgattgtcttttcggtattaggcttcaacctgctgggcgatggcctgcgtgatttaatggattcgcgcctatgagtaacagcgtgctatgtctggatattggcggctcctttattaaaagcgcggtttctccggcgctggggcaacttgttatgccgcgccagcgggcgatgccgctaagctcctggcctgccttcgtctacgccgtacaggagattatcgcgcaatatggcgatgcgattagcgagcagagtccactggcgctctcctgcgccggagtggtggatgtcgccaacgaccgtattctgtcgagcaacattccgccgttcgccggtatcgatataaccggttcgctgcaggctgagctcgggcgcccggtggtgatggctaacgatgctgactgttttaccttggccgaggcgcgtttcggcgcggcaaaagatctgccggtggtgttgggggtgatcctcggcagcgggatcggtggggggattgccatcaacggcaacattctctacggcaatcaggggatcggcgccgagtgggggcacgggcccattacgcgcactcatctgcggggaattgagttgccgcggctgccctgcggctgcgggcagcagggctgcctcgatacgctcggcggggcaaaagggatgcagcggctgcatcaactgctcagcggtcaggcgctaagcagcgtggagatcgttacacgtggcatggcgggtgaagagactgcggcgtttacccttgaagtatggcttgagctggtgagcgaaccattggcccatacggtgaacattctcgggccgcataaaatcgtcgccggcggcgggctggcgggtgaaacggcgctgctggagcgccttgatacagcgttgcgggcaaagattctgctgaagagcgctgagccactactggtcgccggggaatttagccatgaagggggattactgggcgcgtcggtgctgggctgggataaattttaacgatcaaggtggcagattttccggcaccttctaagcttaatctgcttataacaatggagtaataactatgtgcactaatttacacgataacgcccgccgctatgcggaagagaaaaaatgaacgcttcctgctaatcctgccctgtgcccgcccagacgatggcaagggttaatactgtggattagccgacgactgatacgaactaataagaacccgccaatggcgggttcttccattctgacggcctgaacaacttacttcaacattttgttatagacgtaaaaatccgtatcgcgtatgaagccgctacgctcgtataacgcctgcgctttagtattatcggttgccgtgctaagcataataaatgcggaatcactctcttttgccagctgttcggcacgggcaatcaactgctgcgctacgccgtgctggcgggcagactcatcaacgtacagatcgtaaagcaaccagatgcgcttcatttccagcgagcagaacaggggatagagctgggtaaagcccaccgcttcgccgtccacttctgcgaagaaaatgaccgactcattcagctgcaggcgcttaaggatgaactcccgcgcctggccgagattttcttcgacctgatagaaacgtcgataggcgagatacagcggcaggacggtatcgacatcctggggctgggcttgataaatattcatactaaaacctcaataaaattacggatgtaattgtaatacaaatattatcaactgtcgccaaacgcactatgctgcgtatttgttaggcgattgcgacgattgcgggaggcgaaattcagccgaatagcgtaccttatggattattcacgctttttacaggcatgcattaatggaggttcagtggacgcgattaagggctcggagctgaaagtgccggacgccatctttgcatgggtgctcgacgggcagggcggcgtaaagccgctggctgatgacgatattatcgataagagcagtccctgctggctacatcttaattatacccataccgatagcgccgactggttagccgctacgccgttgttaccgaataatgttcgcgacgcgctggccggtgaaagcactcgtccgcgcgtgacgcgcatcggcgatggcgcgctgattaccttgcgttgtatcaacggcagcaccgatgaacgccccgatcaactggtggcgatgcgactgtatatggacgagcggctaatcgtttccactcgtcagcgtaaggtgctggcgctggatgatgtgctgggggatctgcaggaaggcaatgggccgacggattgcggcagctggctggtggaaatttgcgatgcgttgaccgatcacgccagcgagtttattgaacagctgcacgaccggattatcgaccttgaagatgacctccttgatcagcaggtgccgccgcgcggttttctggcgctactgcgaaagcagcttatcgtcatgcgccgctatatggctccgcagcgcgatgtctacgcccgtcttgccagtgagcgtctgccgtggatgagtgacgatcaccgtcggcggatgcaagatattgccgaccgtcttggccgcggtcttgacgagattgacagctgcatcgcccgcacggcaatcatgagcgatgaaatcgcgcagataatgcaggagtcgctgtcgcggcggacttacactatgtcattgatggcgatggtttttttgcccagcacattcctgaccggtctgtttggcgtcaaccttggcggtatccctgggaacagctggcatcttggtttttcgatattttgcgtaatgttagtcgttctaatcggcggtgttacctggtggttacatcgtagtaaatggttgtaagaaattgtcttttcaggcgattttgccgctgaaactccggcaatatttgagcgaaatcaataaaccatctacccattcagggcaatatctctctcgcaggtgaatgcaacgtcaagcgatgggcgttgcgctccatattgtcttacttccttttttgaattactgcatagcacaattgattcgtacgacgccgacttcattgagtcggctttttttttgccctctgccagctaacttctacgcttaaagaatagtcctgtaaagagaggggataaaatatgcgtaacatggcgctatccttgcagtcgatacccatcggccctgagcccaatgatcctgtgccagtgcccgatccgcggcctcgcccgcacccgcttcccgacccgccgccggacgatgacccgattaaattgtcgcatcaagagcggagatctgcgaggatacgcgcctgcagattgtccgccctttaatgcgagaaaacattgtgaccgctttttcaacactgaaccttttgcccgaagctcaactgaacaaccttagcgaactgggatatcacgcgatgacgccggtgcaggctgccgcattgcctgcgatcctgggcggaaaggatgtgcgcgtacaggcgaaaaccggcagcggtaaaacggcggcctttggtctgggattgctacagcacgttgacgccggtctattccagacccaatcactggtgctgtgcccgacccgcgaactggcggatcaagtcgctggcgaactgcgtcgcctggcgcgttttttgccaaatattaaagtattaacgctctgtggtggccagcctttcggcgcccagcgcgattctttacagcatgcgccgcatattattgtcgccacgcctggccgcctgcttgaccacctgcaaaaggggaccgtatcgctggatgcgctgcagacgctggttatggatgaagccgatcgcatgctcgatatgggcttcagcgatgctatcgatgaagtgattcgttatgcgccagcttcgcgccagaccttactgttctccgcgacctggccggaagctatcgccgcaatcagcgggcgggtgcagcgggatccgcagacgattgaaatcgatagcgttgatgcgctgccgtctattgaacagcagttcttcgacgtttcgcaaagcggtaagatcaagctgctgcaaaaattgctcagccagcatcagcccgcttcctgcgtggtattttgtaatactaagcgcgattgtcaggcggtatgcgatgcattgaacgctgccggccagagcgcgctatcgctgcatggcgacctggagcagcgtgaccgcgatcagacgttagttcgttttgccaacggtagcgcgcgcgtactggtggcgaccgatgtcgcggcgcgcggcctggatatcaaatcgctggagctggtggttaactttgaactggcgtgggatccagaggttcacgttcaccgtatcgggcgtaccgcgcgcgcaggcgaaagcggcctggcgattagtttctgcgcgccggaagaggcgcagcgcgctaacattcttgccgaaatgctgcagataacactcaactgggttaacgcgccagcgggtaataatattgcgccgctgcaggcggagatggcgaccctgtgtatcgatggcggcaagaaggcgaaaatgcgtccgggcgatgtgctgggggcgttaactggcgacatggggtttgatggcgcggatatcgggaagatcaacgtgcatcccgcacatgtttatgtcgctatccgccagggcgtggcgcagaaggcgtacaagcagttgcaaaacggcaagatcaaaggcaagtcctgccgcgtacgcctgctgaagtaagggctggaaggtgaaggtctccgacggttgccggagaccagttgcctgttattttacttcaaccacattcagccgcagttcatctaactgagcgtcttcttcttccggttgccagcccgcaggctgcagcgggatctcttcgcggtcaaaggccagatcgccgccgtcaaccaccgcagagccgtgagtgatagatttaaaatcaaacagattgacgtcgctcaggtgcgacggcaccacgttctgcattgcgctaaacatggtttcgatacggccaggataacgtttatcccaatcgcgcagcatatcggcgatcacctgacgctgcaggttaggctgagagccgcacaggttacaaggaataatcgggaagcctttggcctgcgagaagcgttcgatatctttttcgcgacagtaggcgagcgggcggataacgatatgtttgccgtcatcgctcatcagcttcggcggcatacctttcattttgccgccgtagaacatgttgaggaacagcgtttgcaggatatcgtcgcggtgatggccgagcgcgattttggttgcgcccagttcggtcgccgtgcggtagaggatgccgcggcgcagacgagaacacagtgagcaagtggttttgccttccgggattttctctttaacaatgccgtaagtgttctcttcgacaatcttatactcaacgcccagctgttccagatacgccggcagaatgtgctccgggaagcccggctgtttctgatcgaggttaacggccaccagcgagaaagaaataggcgcgtttttttgcaggctgcgcagaatttccagcatggtatagctgtctttaccgccggaaagacagaccataatacggtcgccatcttcaatcatattgaagtcggcgatcgcctcaccgacattgcggcgcagacgtttctgcagtttgtcgatgttgtatttttcttttttactaatttcttgattttgcaacatttaatagtggctcaattcatagtgtggcatcagaagagcacgcgttgtgccagtcgctggatcaatcccgctggcgcgtagcaatgagtgaggtctgatagaaaaccgtggcgtgtatggtacggattcggggggcaatgtcagcatctttccggcactttaatccgcgaggagtaaagataataaagcccgccgggcggcgggcttgggatcacctgacgaccagcaccgagcactcggcatggcgcaccaccgccgcggcgttagagccgagcagataggtagtaatgtccgggcgatgggaggcgataatgaccaggtcggcgggcagcgatttagccagcgccagaattttatcttttggcgagccctcggcaacatggaaatgcattctgtcttccggaatggcgaagccttttgccagctcacgcaactgtgcttccgattcggcacgtagttcatccatagccggcagttcagcggtataggccatacccagagaggcgtagtagggtagcgaagggataacggtcaggaaatgtacctgcgcgtcatcgacacgcgcttcggattcaacgtggcggatcacacgttgagtaaattctttatcagaaatatcgatgggtaccagaatcattctactcataaaacctcctgttttaataaccaccaaaacagtatgccatcaggattgaggttctactacagcgtgaatcacaaattggtacgggaaccggcattttattggcggttgaagtgaaatgcccgccgcaaacggcgggcgcaagcattagaactgatataccagacccagtgctacgatattgtcggtagaaataccgttgtctttatagaagtcgtcattgccgtcgagcaggttgattttgtaatcaacgtaggtggacatattacggttgaagtaataggtcgcgccgacatccatatatttaaccagatctttatcggagtactgaccgccgtaaaccagatctttacctttggactgcaggtaggaaattgccggacgcagaccgaaatcgaactgatactgtgcagtaacttcaaagttctgggttttgttggcgatggtgccattctgattgccgtagggcgtcatgttacgagtttcagaatacatggtcgccagatagatgttgttcgcatcgtatttaacgcctgcggtccaggcatcggctttatcaccgcccgcggtagactgatgggtctgctcgttggtacggtcagaagagctgtaggccgcgcctacgctgacgcccatacctaaatcataggtagaggagataccgaagccatcgccgttggagtttttaacatcgcggccgtcgccattggcggtaccttcctggctggcggaagggttatattcgtggctggactgatcttcatttttaccctgatactgcaaggcgaagttcaggccgttaaccaggccgaagaaatcgctgttacgataggttgcgacaccgttggcgcggccggtcataaagttgtcagcgtaggtgtaagagtcgccgccgaactccggcagcatatcggtccaggcttctacgtcgtacaggacgccgtagttacggccatagtcgaatgaaccgtagtcgcccgctttgatcccggcgaaagccagacgagtccatgcctgatcgccagagctttcagtattgttagcctgaacgttgtattcccactgaccgtagccggtgagcatatcgttaatttgcgtttcacctttaaagccgaagcgcaggtaggtctggtcgccgtctttgctggagtcgctggagaaatagtgtaagccgtctaccttgccgtagagatctaatttgttgccatctttattataaatttctgccgcgtgagcagcgccggcagccaataatgccgggataaccaatgccagtgcttttcttttcatttggatattcctttaactatttttgttttaacttcctgggtggaagtacggccatgctaaaggagcgcattctgatatgataagtatcaattgttacaatataagtaaattctaaagcaaataaatatacagtaatgataattttccgcatgaatatattgtgaggatgcatataaaataaaaattatacatcatcgtttgaatatcgtattctgcctgggttatatgcctttattgtcatttaaaatttatattgttgccgtctcattcatatcgaatgattaattcgtcggaaaatgacaagcccgaatagttttactattcgggctttttttatcgcgccagattttcgtccgccgggttaactttcggttgccggtttctccgttttacctgccagctgggccaggaaatcatagcgtttttgcaggtcggcggccgcgtccttccacaactgctcggcgacttccggctgctgggcgttcaggcggcggaagcgttgctcgttgagcagcgtttcagccagcgcgtctgatggcgggcgcgagtccaacgccagcggcagcttgccttcatcggcgcgatgcgggtcgaagcggtacagaggccagaagccggttgccgtcagctggcgcatctggtcgtggctcaacgccaggtcatagccgtgctcctcgcacgggctataggcaataatcaacgatggacccggataggcttccgcctcctgaatcgccttcaccgtctggttaagctgtgcgccgagcgaaatctgcgccacatagacatgaccgtacatcatcatgctcacaccgagatctttgcgcgccttacgtttgccatgttcgccaaacttggtgactgcgccgagcggcgtcgcctttgatgcctgaccaccggtattggagtaacattgcgtatcgagcaccaggatattgacgttttcggtcaggctcagcacatggtcaagaccgccaaagccaatatcataggcccagccatcaccgccgataagccagactgatttctcgactaacgcatccgcatcggtgagcagctcttcggccccttcgacccccgtcagcgcctgacgcagctcggcgacctgttcgcggcgcgcttccggcgacgcttccgtatgcagcgcggcgttcaattcggctggaagtttatcggcaaattcgctcaacaaccgcatcacgcgctggcggtgttggtcgacggttaagcggaagcccaggccgaattcggcgttatcttcaaacaacgagttggcccacgccggaccacgtccgttagcgtcagtggtataaggcgttgaggggaggttgccgccgtaaatggacgaacagccggtggcgttggcaatcaacatccgatcgccatacagctgggtcaacagtttgatatacggcgtttcgccacagcccgagcaggcgccagagtattcaaacagcgggctaattagctgcgaggtgcgaatatcaatgcgctcaagtttggtgcgatcgatttccggcaggttgaggaagtagtcgtaattgactttctcttcttcaacatgctcaaggcgcgacatcatattgatggccttgatgtccggattctggcgatctttcgccgggcacacttcgacgcaaaggttgcagccggtgcaatcttccggcgcgacctgcagaacgtatttctgcccgcgcatatcgcgggatttcacatccagcgagtgcaggctggctggcgcgttttccatctcttgtggagcgaccactttggcgcggatcgccgaatgcggacaggctgcgacgcagtggttgcactgggtacacagctcttccttccagatcgggatctcttcggcaatgttgcgtttttcccaacgggtggtgcccatgggccaggtgccatctggcggcagcgcggagaccggcagcgcatcgccaagaccggcaagcatcgctgcggtgacggttttgacaaagtccggcgcggcatcggagaccactggcggacggttgggactgctggcgttaaccggctgcagcggcacttccgccagcgattcgcgggccagcgccagcgcctgccagttgcgttccaccagctcctggcctttactgctgtagcttttggcaatcgcaccctgtagttcggccagcgcgctgtcgcccggcaggatttgggttaaatggaaaaaggccatctgcataacggtgttgatgcgcgcgccaaggctgcactcacgggcgattttcgccgcgttgacgacataaaagcgcgcctgcttttgattcagcgcggcctgtacttcctgcggcagacgggaccatacctcatcagcgctatagggagtattgagcaggaaaatgccgccaggcttcaaccgctctaccatctgatatttatcgataaactgcagttggtggcagccgacgaaatcggcctgcgagatcagatacgacgagcggatgggtttttcgctgacgcgcaggtgcgagacggtcaggccgccggccttcttcgaatcatagacaaaatagccctgtgagaaccacggcgtggagttgccaataatcttgatattgttcttggtcgccgagacgctaccgtcgctaccgaggccgtaaaacagcgcttccagcttcgcttccgccggtagcgtattttccgccagcggcagcgaaaggtttgtcacatcatcataaatgcccacggtaaagcggggttttggctgtgcggcctgtaactcattaaagatagccagcacgcattccgggccaaactctttggacgagagaccataacggccgccgatagtacgcggtagcgtttcgcgctcgccgcggttgaaggcttccgccagcgcggtcatcacgtcgagatacaacggttcggcaagcgcgccgggttctttggtgcgatccagcacggcaaccgcgcgggcgctttccggtagcgcctgcagcagatgtgtggcggagaacgggcgatagaggcgaactttcagcacgccgactttttccccacggctcagcagttcatcaacgacctcttcacaggtaccgatagcggaccccatgatgacaataatccgttccgcctgcgggtgaccgtaaaattcgaacggtttgtactggcgaccggttgcggcggcgaaatcattcatcgccgtttcaacgtgttcgtataccgcgtcgtaccacgggttggtcgcttcacgggactgaaaataagtgtctggattggcggaggtgccgcggatgaccggatgctccgggttaagggcgcgttggcgatgctcggcgattttatcctgcggcagcagggaacgaatagtgtcatccgccagcggcgcgattttgttgatttcgtgcgaggtgcggaaaccatcaaagaaatggataaacggcacccggctttgcagcgtggcgatatgggaaatcagcgcgaagtcctgtgcttcctggacgctgctggcgcacagcatcgcgcagccggtctggcgcacggccatcacgtcggaatgatcgccgaaaattgacagggcgtgggtagcgacggtgcgggcggcgacgtgcaggacaaatggcatcaactggccggccaatttatacagcgtcgggatcatcagcagcaggccctgcgatgacgtaaaggaagtggaaagggcgccggtctgcagcgcgccgtgcacggcgccgatagccccggcttccgactgcatttcgaccacgcgggggacatcgccccagacgtttttcagcccatcgccagaccaggcgtcagcctgctccgccatcgttgaactgggcgtaatcgggtagatggcgataacttcactcgtgcgaaacgcgactgaagcgaccgcgccattaccgtcaatcgtaatcataagaagacacccttacattgcgcaaaaagaagggactcgtgaaacggcgacgagtcctgttgttatctccatattttagcaaacgcccgccgcgaccattttcgcatttgtgtccttgggaatgtccttatctatgtttggatcaactttttggcggaaaaacaaaaatgtggctgataaaggggccgaagtgggtggcgttggatacctgcgatgcaccacttaaataaagcaaaatatatttttaaatttaatagcttttagccaaccggcaatcgcgtgctatttatttgctgcggtgaattcccctctgcggcggagcgttcagttcagtccccgttggcgaaaattagcacgcgaattagctcgaactggctaattcaccgggaggcacccggcaccgcaatcattcgttctcaacttatgccgccaggtcgctgcaagcgtgattttttcgtcgggaaaatatttcgctctgggatgaaagtcgcgctggcgcggcgctttgcctgacgagatcaagctttaagcggaaaatttgctagaaaatgttaatgaggcgcataaatacgtatttcgcctctcgacggcaggcgctgcgctgcctattattcttgagtttgtttattctaagatgtttctgaaaggggagaggatgcgagctgcgtttttagtggggtgtgctgcgttattactgtcggcttgtagcaacgagccggtgcaacaagcgactgcggcacacgtaccgcccggcatgcgcgccgcgatgagcgacagcggccaggcgaattgcgcgatggttggcggttcattatccgttgcccgccagcttgatggctccgctattggtatgtgcgcgctaccgaacggtaaacgctgcagcgagcaggcgttagcgggcggaagctgcggaaactattaatacgcaacgcgcctcgctacattaaatcggcgagtttatacaccagcgagtggtcggcggtcgccagcgtgagctgattctccgtcagatcgacctgcgcgccatcgcgcagcattttgctgagggtattatccagcgcgttccgttgtggatccgcgcacagcttacgcgtcatcgccagctgttcaacttttagctcgccgtctgacagtttgccctggccgctgaagccattgcacatcgtgcctgatacatacattttttcaccgaagctaatttccggcggcggcgtctggcttgccggtagcgcctggccgttaacgctggtcagcacaaaacgatgatgttgtagttgttcggcgttggtagaaactttgctgttgtatacgcagcccgagagcagcatgcccgccgccagcagtgcagcaaacttattcattcgtactccaaaacatttgtcatatcaataaaagcgaaaacagtttaactgtaatgcaggcaggatctgtggggattatctgaatgtgcccccgttagcggggagcacaaaaggggaaagaagtttagaccagcgcgttcgggcaggtttcgcccttagctacctgctgcagattgccaagcgttgtctcggaaataccgatcagcgcttctgctgtcaggaatgcctggtgtccggtaaacaggacgttgtggcaggcggagagccggcggaacacgtcatcctggatgacatcattcgatttatcttcaaagaacagatcgcgttcattttcatacacgtccattcccagcgcgccgattttctggtgcttcagcgcgtcgatagccgcttgtgaatctattagcgcgccgcggctggtattaatgaccatcacgccgtctttcatctgatcgaatgccgcctggttgagcaggtgatagttatcgttggtaagcgggcagtgcagggatatgacgtcggactgcgcgtacagcgtcggcaggtcgacatattcaacgccgagatccagcgccgccgcgctcggatagggatcaaacgccagcagacgcataccgaaacctttgaggatccgcaacgtcgcaacgccgattttaccggtgccgatcactcctgcggttttaccgtacatggtgaagccggtcagcccttccagcgagaagttggcatcgcgggtacgttgataggcgcggtgaatgcgacggttcaacgacatcatcataccgatggcgtgttcagcaacggcttccggcgagtaggccggaacgcgcacgacgcgcaggcccagctctttagccgcgtcaagatcgacgttgttaaacccggcgcagcgcagcgcgatgtatttcacgccgtgggcttttagctcttccagcaccgggcggctaccgtcgtcgttaacgaagatacataccgcttcacaaccgttggccgttttcgcggtcttttcggtcagcatgaagtcaaaaaattccagttcaaagccgtatgcgtcgttaacatgctgcagatactttttatcgtactgcttggtactataaacagcgattttcataaggctttcctctagtgataataccgtcacggtagcataattaaaataatcttacaaatattaaaaattagtttaatcatcaggttatgatattaattctagagcatatctcagtcttaagaaatctctttaaaagacaatacgtttcaccaaaaactgaggctgaatgccccggcgctagcaggataaatggccagagcaaacccgatgccacattggcaacctggaaacaccatagcggtgtaccgctggcgccggtgactagcggtaacgttgctcgcagcggcgacagaaaacggctaaagaacaccgcccaaccgccgtgacggcgcaggaatagctggcaacgcagcacgcgttcggcgctgagccagcgcagacgctgcagatgatgctgatagcgacggccaatttgccatgagagccagaatccgccgattgcgcccaggctggcgcttagccacattaacaggaaatgaccgatgctggttgaggcaagggctccgagaaccagcaacccggaggtaccggggatcacaaaagagattagggcgcaggatttactgaaggtcagcagaaaaacaatcagtaataccaatgaataatggctctgggcgcgttcgatcagcgagataatgagctccacggaataacggctccttattacctgtttttccaagtgtcgcaggcacaatttaaacgaagactaaatagttattcagcagaaatgagtgcgactatccttaatcaggacgttaactttcactcgcgggtcgaacgtgccacaataggcgcttatcggcttttacttagaatcaggatttgactgcccatgaagggtaaatataaagccgctcttgcgctgttattagtacttattttgctgccgctggccctgttggccacattaacacattgggttccgacgctggcgggcatctggctgccggtcggcacgcgtatctccctgggcgaaagcccgcgcctgacgcgctcctcgctggtcatccccgacctgcgctacctggtgggcgactgtgaaattgctcgggtgagtaacgcgcggcttacccgtcccagccgctggcgacttcacctcagcgaactcgatatcaatagcgcctgcctggctaagatcccgccagcaagccgctctccggcgcgccgcgaacgcttgccgagtggcaatcgatgctgccttatagttggttaactatcgacaatctgcgcctgtcgccgtgggaaaaatggcaggggaaactggtgatgtcgctaacacctgggcagcaggatatcggctatgctggcaaagatgtcacgctacaggcgaagctgcgcggccagactttaacggtcagcaatttcagcgcgcggctggtggaaaatcaggcgccggtgaagctggttggtgaattcgaaatgccgctggtgccggatggtcttccggtcgatggccatctggtcagcaccttcgaattcccgcaaacgccgggtctggtggatgcggaactggaatggcagaaaaaccgcggccaattgctggtcacgccgcgcggtgaggttgagccgatgctcgacctgccgtgggagatcacccctgaacgtatcaccatcagcgacgggcgctggaacacggtgtatgccggctatccgcttagcggacgggtcgcattatcaattggcgattggcagcaaggcaccgaggagatggaaatcagcggccggctcaacgtgttaacgcacggcgaagcgggtaagggcaacgccgtgctgaatattggcccaggtaagctaagcatggatcacagcgacatgccgcttagcctgaccggcgaagccaagctcgacgatatgattttttatgccgtgttgcccgcgaaactcagcggcccgctgatgacgccagagctggctttccatcccggcgcgctgctgcgctcgcgcgggcgggtgattgactcgctgaacatcgatgagatccgcctgccgttagcgggggtgaaagtgactccgcagggggtggatggccgcctgcaggcgatactgcgtgcccatgaacaggaaatgggcgattttaccctgcacctggatgggcaggctgacaattttatgcccgaccgcggtcgctggtcgtggagttattggggcgatggtcactttacgccgatgcaggcgcgctgggatgtgaaaggcgccggtgagtggcgggatagcgccattatccttaatagcctgtcgaccgggttcgataagctacagtacggcactatgttggtcagcacgccgcgcctgaccctcgataaacccattcactggctgcgtaatgaacagcatccgaaatttagcggcgcgttgtcgctggatgccggtaaaaccaccttcagcggcggcagcgttctgccgccttcaacgctcaaattcaatattgatggccgcgacccgacctggttcctgttcaatggctcgctgcacgcggagaaaatcggcccgattcgtctgaccggacgttgggacggcgaacgcctgcgtggccaggcatggtggccgaaacaggcgctaagcgtatttcagccgctgatcccgccggactggaaaatgaccctgcgtgaaggtgatatgtatgcgcaggtggcgttctccgcggcggcagagcaaggttttgaggccggcggccacggcgtcttaaaaggcggtagcgcctggatgccggacaaccagatcaacggtgtcgactttgttctgccattccgcttcagcggtgggagctggcagctcggtacccgccgtccggtttcactgcgtattggcgaaatcgtcaaccagttcaccgccaaaaacctgagcgccgatctccagggaacatggccctggagcgaacaggatccgctggaattgagcaacgttaatgttgatatccttggcggcaagctgaccatgcagcagctaagaatgccgcagcatcagccggcgttgctgcgtctgcagaatatctccagcagtgagttgataagcgccatcaaagtaaaacaatttgcggtctctggcgcgtttaacggtgcgttaccgctatggctgaacaacgagaaatggatcattaaagacggctggtttagcaaccccggcccgatgaccatgcgtctggataaagacaccgccgatgcgttggtggccgataatgtctccgccggtgcggcgataaactggctgcgctacatggaggtctcgaaatcctggacgcgcatcaaccttgataatctcggcaagttgacaatgagcgcggcgattagcggtaccagccgggtggacggtaaaagcagcaccgtgcatttaaactatacccatgaagagaatattttcgatctatggcgcagtttgcgcttcggcgataatttgcaggcatggcttgagcagaatgcgaaactgcccgatccgcgctgtacggatacatgtaaggaaccaaaatgataaaactgttcgccgcggcgctggcgaccctgctgctggcaggttgtacgccgcgtattgaaatcgccgcgtccaaggagccgatcaccatcaatatgaatgtcaaaattgagcatgagattcatattaaggtggataaggatgtcgaaaatttgctgaagtcacgtagcgatctgttctgaggcgataatgagaaaacgactgctgactgccaccctggcgttaatgctgttgagtagcccggcgctggcgctgaccttgaatgaggcgcgggcccaggggcgagtgggggagacgctgaacggctatctggcgccgctgaaacaggatgcgcagacgttggcgttagttaaacagattaatgccgcgcgcagcgaaagttatcagcaactggcggacgacaataatctgccggtggatgaagtggcgaaaatggccggacagaaactggtcgcccgcgcgcagccgggagaatatgtgcaggggattaacggtaaatggttgcgcaaatagttaacgatagcgcttgcggtattcgccaggcgacacgccgaagcgctgcttaaacgccgttgaaaaatggctatggtcgctaaagccccaactgtagccaattcccgccagtttctcttcatcgtgcgcgttttgtaacgcccgggcgcacaggtcaagacgccggtttttaatatactgcgcgaccaccagacccttatcggcaaacaggcggtacaggctgcgtaccgacatgccggtttcccctgccagccactccggacgcagctgttccgactgtatcgactcatctatcaacgccattatcttttgaaattgcttgtcgcggcgcgtcggcggcgcgtcctgttgcagcagcattgggcgtaacaggcagatgatagcctccagcgccgcttcgccttcgctttccgagagcgccgggctgcgtaaactttcttgcagcaaccgctggctgagctggaccatcggcagcgttttattcagccgggtggcgatgctgatgtcgccgccgtgcagctggctttccacgagctggcggggcagcagcagcgaagcctgttttgacgtgtgttgccagaagatagaacagggacgggaagcatcaatcagcgtgatatcgccggcttcgagcgccacctggcgctcgtcctgctcgatagccgcctgaccttcgagctgaaaaacggtatagaaccaggcatcgttatcgcgtttgatttcgttacgggtgcggtaaagattgacgccgcgggcggtgacggtactgactttgagactaccggtatagcttgcatctatctcgccatggaactcgccgtccagtggacgggcggcaaaatggccgcatacctgattaatcttcgctaaccaacgctgatagtcctgcccgctttctaccgtcgccatcgtctgcaccttgtaataataatgtttctgcattgttgcatttatgccgtgagtggcaagagcgcagcgtggagtatatgaaagaactattacctgcggcacatttcgccgcctttcagggcgcttaattgcggtacctgtcacagcgacaataacgattgtcacagagaaaaaagcgcaaacggctgacccgacctagactgtgttcactatccgcgaacaataaggaagtcgcatgtccacatcacaggtcgcgctgctcgccagcgtacagcagtttctcgacagacagcatggcttatatattgatggcaaccagcaggcggcgcagagtgaaaaacgcttaaccgtctgggacccggccaccggccaggcgattgccactacggcagatgccaacgccgctgacgttgaccgcgcggtgatgtccgcctggcgcgcttttgtcgcccgtagctgggccgggcgcacgccggccgaccgcgagcggatcctgctgcgtttcgccgatctggtggaacagcacggtgaagaactggcgcagctcgaaacccttgaacagggtaagtcgatcaatatctcgcgcgcgtttgaagtcggttgcaccctcaactggatgcgctacaccgcagggctgaccaccaaaatcagcggccgtacgctggacgtttccattccgttcccggaaggcgcgcgttatcaggcgtggacccgtaaagagccggttggggtagtggcggggattgttccgtggaacttcccgctgatgatcggcatgtggaaagtgatgccggcgctggcttccggttgctcaattgtgattaaaccctccgagacgacgccgttaacgttgctacgggtagcggagctggcaacggaagccgggatcccggatggcgtctttaacgtcgtcaccggtagcggcgccgaatgcggcgcggccttaaccacccatccgcaggtggcgaaagtgagctttaccggttcgaccgccaccggcaaacatattgcccgcgcggcggctgaccgcctgacccgggtaacacttgagctcggcggcaaaaatccggccatcgtgctgaaagatgccgatccgcagtgggtgattgaaggattgatgaccggaagtttcctcaatcaggggcaggtatgtgccgccagttcgcggatctatatcgaagcgccgctgtttgataacctggtggctggctttgagcaggcggttaaatcgctgcaggtggggccgggaatggttgaaacgacgcagattaacccagtggtgtcgcaggcgcactgcgctaaagttgccgcttatctggatgaagcgcgtcaacaaaacgccgagctgattagcggtaacgttgggccaaatggcaacggtttttatattgcgccgacgctggtgataaatccggatgccggactgcgcctgaatcgcgaagaggtgtttggcccggtggtgaacctggtgcgcgtcgccgacggcgaagaggcgctacgtttagccaacgacagtgattttggcctcaccgccagcgtctggacccgcgacctgacccaggcgctgaattacaccgatcgcctgcaggccggtacggtatgggttaacagccatacgctgattgatgccaacctgccgttcggcggaatgaagcagtccggtaccgggcgcgattttggcccggactggctggacgactggtgcgaaaccaaatcggtgtgcgtgcgctactaattttttgtcggatggcgctacgcttatccgacctacggttcgtgcggcctgcctttaatttattcaccatgctgactgaaactgccggtgttggtggcctcaaaatcgctgagacgttcccggaaggccggggcagcccgcatggatgcgggctgagggccgtgatttgcagggacgctgcctcggcccgacccgaagcctgcagggataagtcgaaggcaccacgaagtggcgattttggcggccagagcccgggagtacagagggcggcggcgactggccgccctctgtgcgctccctgcgccatgatagacataacgcagaagacatgtcgggagcgcaatgtgctctgaaataataaaaaacaactgtttttcccggaccaaaacagttgcaaatcgataacagtatctacagcgctgtgcgatttggtagcccggagaaggcgcacatgcctctttcccctgagcgctgatttgctatgatcggcgctctttttttctaatgttgccccgctatgtggaatgatgcgctttgctatcagcagtacggcgcgccggaaacggtgctcgcgctgcatcacgtgccgttgccgccgctggcgcccggacttgttcgggtacaaatgcgctatgcgccggtcaacccttccgatttgattcccattaccggcgcctaccgccatcgtacgacgctgccatcggtggcgggctatgaaggtgttggggtggtaattgaagactcgacaaacggtcgaccgctactgggacaacgggttctgccgctgcgcggcgccggaacctggcagcgttatctcgatattgacccgcgctggctggtgccggtcgctgaagacatcgatgacattatagccgcgcgcggctatatcaatccgctgaccgcgatgctgatgctcacgcgctggccggtcgcggggaaacaggtgcttttgaccgccgcttcatcgtcctgcgccagcctgctgggacagtgggcgatcgccatgggggcgcgttcggtcagcggtattattcgttcgccgcagcatatcacgcgcctgcagcagtatggcgtctacccgctacttgaaggtgacagagcgctgattgaacaagtaagccagtacagcgatctggtgtttgatgcggtgggcggtgagctggcgaattttctgctagcggtactgccgcagaggtcaacgctggtctcttacgggttattatccggtaaaccgctcacccagacgcgaggctgcgcagcggtacgcaaatttcatctgcgggaggccttaccgacactcagcgttgatgcgtggcaggcggcgtttgccgggatctggcgacagctgccgaccacggcgcagcccgccgcgcaggtgataaagctgtgcgactggcgtgaggcgattgccgccgcaggccagccagggagaggcggtaaaatcctgctcgatttcaccgcgggctaagattactttttcttctcgccaagcgttggggtttcgtcaaagaagttccacggcttgagtagcgcatgcgcccactcggtcggcatgattggccactcttcggcgcgagcgacgtgagtggtgccggtggtgatccacacgacgtcgtcgtggttagtcagcgactcatcatccttcgcgtactggcctaagccggtatcctgggcggaacggttgggatatttcccttcaggataacgttcgcctggatggtagcgcgtcacccacagctgtttatccataaagctcaggcgatgatatatccactcgtccggggcgaacttcgcgccggtcgccgccggatgcgtgccgccggcataagggataatctggtaagagaccgggttacccatgcggttctctttgctggtgttgctcagcaggcggatagtgccagggtcgaatttctgcgccgctttctgctcgctgtcgattgtgtactgattcacctgcatggtgctggtgcgcgggccgccggcggtgtttggcttcacttcaggatccatcgccaccagggtgttgttttcgccgtccacgtcgagatcgaggcggaaattataaatatgctggtgggtggtgccgacaatattatggtcgatcagcgtcccgtagcgggtatcctctttagcgctggggtcgtgcatggtcttcgccttcacgcctttcactgcttcaatgccggtggcgccggcatcgatgccgatggtgccgttatcgtggaacacccagtcaaagatataatcatagttcccgacggtactgatccagcgcactaccagttccctgcgctcggtgctgacgttgggcttgcccatttccaggtgcttatattctggcccggcatagcgttcgaatatggcgaccgcgcctggaatagtggtcggtttgccggtgtaatcggcgatagtttcgtccagcagtactgcatttgacggcgcatctttaccgcgaacaatcggcgatgttagggtgcccatgccgtaatcgccggagtccagataggctttgaaataccagccgacgtccgggtcgccgtaggggacgatcatcccgccgagggaaccttcatacatcacctggcgttttgtgccgttatcgttgtaagtcaccgttgacaggattggcccgacgcgcgagttcaggcgcagatgaaaatcccagttccgccagtgaatggtatcgccggtgatcgtgtagtttttgccttccggttcggttatctccagcggtttcaccgccggggcgttgcggtcgcgaccatcatacggacgtggctccatcggtaccgggatcaccgggccttcctcgattttgatgattttcttcgcttcgaggtcgaccaccgccaccaggttttcaatcgggtgagcccagtagttgccgtcgccggtatccagataactgacgaccttcagcagacgcgcatcctgctgcaggccatctttgccatcaaagtagccgacggtgagcggggtggtgaccactttactgggatcggtaataccgtgctttttcagcacctcagcgaactcgctgctggcattgatgatgttctgcacgctgacgaagtcatcgagcagtaccataccgtgggcgcctttaatcggcgtccatgagaggatttttttgttttgcaaatcgacgacggcttcaatgacatgtttgccatcgagcatcaccacatcggcggtgcgggggcatcaacgggtgttccctgcagagcaaaggcccataccgccgctttatccggctcgtgtaaggaaatctcagtaaagcgggtattcggctggaactccggcgcggctttgacaatggtcactgcttcactgatttccgccgccgagagcgagtttaacgggtgagggcgcttttctacctggaaggtctgatcgagaccggactggaatacatcgttgataaaggtatcggagacccaggctttaccttccttcattactaccggcacctgtagatcaagggatttaccgttgacgatcgccgttttggcgccgggctttactttgacgtaagcgccgtcttttatcagggtaaacatttgcgcgtagtcatcccactgcatatcggcgccgaacgcctgcagcgttttatccaacggcaccatgtgcgcttcgctaccgtgagcgaagaccggtgattgccaggcgcaaaccaccgcgacagccagcgccagcgcggttttacgaggggaaaacatcaagccgtttgccattgtgacctcatcttattgttgtgttgttgttgccgctgcgaatgtcggctttgttacgcttaccctagcagtctgccgcccgggaacgtttgtttgcttttgccagcttgtttgtcagttttgccagacggacgtaaaaaatgcctccgtagaggcattaagcgcgtgggtggtgcgtgttgactacgccgggaagtctccctgctggcgcgccaccagggttagaatggaatacagcgccaccgcctgctggtgctggttgaaaatctcgacagcccattccaccacgccggtggctttctcatcggcgctgcgctgacgtttgaccgttttccgcttacaggtcaggcgaacctgaatggtgtctcccggtttgaccggctcaataaagcgcaggttttccatgccgtagttggcgataaccggcccgacgccggcatcgacgaacagcccggccgcagcggagatcaggaaataaccgtggaccacccgctcgccgaaaatcgactcggcggcggcgattttgtccatgtgcgcgtagaaatgatcgccgctcaggcaggcgaaattaacgatatccgcttcggtcagcgttcggcgcggggttaataagctatcgccaggctggatctcttcgaagtatttacggaacgggtgaatgcggtcttcgctcacctgagcgccgcgcacccactgctggcttatggtcgccagcatcgttgggctgccctgaatcgcggtacgctgcatatagtgtttcaccgaacgcagtccgccgagctcttctccgccgccagcacggccggggccgccgtgtaccagctgcggaagcggcgaaccgtggccggttgattctacggaggatgcttcattcagtatctgaatacggccatgcgcgcgcgcggcgccaaggataaactcgcgcgccagctcgccgttggcggtgaccagcgtaccagccaggctaccgccgccggcgcgtgccagcgtgagcgcatgctggcggtcgcgatacggcatcagcgtcgctaccgggccaaaggcttcaatggcgtgaacctctggcgtttcatccggctgcgggcagtacagcagggtcggcgggaagaacgcgccatcagcattaagatctgcctgtccgccgagcagcgcttcacagccggcggcaatcagtttattgacgttatcctgcacatcctgacgctgttcgcgattaaccagggcccccatcttaatgccctcctgcgcagggtcaccgacggttactttatgcaggcgggagatcagtgcatcgctaaccgcattaatctgagccagtggcacgatgattctgcggatagcggtacatttttgcccggctttcgccgtcatctcgcgaaccacttcccgaataaacagcgcgaattcaggttgctccggcgtgacgtcttcgcctagtacgcagcagttgagcgaatcagcttccatggtaaagggaatagatttggccaccaggttagggtgcgtccgtagctgctggccggtggcggctgagccggtaaaggtcaccacgtcctggctatcgagatggtcgagaagatcgcccgcgccgccgcaaatcaggctgatggcgccttctggcaccaggccgctgtcgacaatcgctttcaccattgcctgggtaagttgagcagtcgcggtggcgggcttaatgatagcgggcatgccggcaagccaggtcggcgccagtttttccagcattcccagcaggggaagttgaaggcgttgatatggacagcgacgcctgattttgatgtcagtacatgacgcgcggcaaaaccgccttgtttggagagcgggatgagttcgtcttccggccacaggatatcgtccggtaattctcgactaccgagcccggcataggtgaaaagggtaccgataccgccttcaatatccacccagctgtcggcgcgggtcgcgccggtttgcgcggagatggcgtagaactcgtctttctgctccagcagccgttttgcaaccgcttttaacatcgcgctgcgttcaataaaggtcatggcttgcagagccttaccgccgcgctcaatcgcgaagcggcgcgcttgcgccatatccagaccttcactggtcacctcccaaagcgccgcgccggtaatggcgtgatggatagtacgggcgcggccccggccggtctgccaggcgccggataagtagctggctaactgctgcatcgcaaatctccaaatgtgttacacgtgattactataaatagttcttttatgaatcataaaaatcaagtctgtatttaataatttattaacattgtgatcggtgactaattggttgttgtgcttatgtcgctgttttatctaccatttacaaaaggttttgcggttatcatcacaaaaagaacaaacaaaatttgtggttttatttaaccaatatgtaaccttcaataaacaaagtgattcacataaatgtttttgttgtgaatatcggaatcataaaggtgatgacgtgacagaagaacaacgctttgaccagcgcatcgcgcaggaaacggccatcgaaccgcgggactggatgccggatgcctaccgtaagaccttgattcgtcagataggtcagcacgcgcactcggaaatcgtcggcatgctgccggaaggcaactggatcacccgcgcgccgacgctgcgccgtaaagcgattctgttggctaaggtacaggacgaggctggacacgggctgtatctctatagcgccgcggaaacgctcggctgcgcccgggaagacctgtatcagaaaatgctcgacgggcagatgaaatactcctctatttttaactacccgaccctgagctgggccgatatcggcgtaatcggctggctggtcgatggcgcggccatcgtcaaccaggtggcgctgtgccggacctcatacggcccctatgcccgggcgatggtcaaaatctgcaaagaagagagttttcaccagcgccagggatttgaagcctgcatggcgctggcgcagggcaatgacgcgcagaggcagatgctgcaggacgctattaaccgcttctggtggccggcgctgatgatgtttggccccaacgatgacaactcaccgaacagcgcccgcagcatggcgtggaaaatcaaactgcactccaacgacgagctacgtcagcgcttcgtcgataacaccgtgccgcaggtagaaatcctcggtatgaccgtaccggacccggatttgcagtttgatgaagccagcggccactaccgcttcggcgaaatcgactggcaggaatttaacgaggtgattagcggccgtggcatttgcaatcacgagcggctggccgccaagcgtaaggcctgggaagagggtgaatgggtacgtgaagccgcgctggcccatgcgcaaaaacagcaggcccgcagcgcggcatgaggagagacaacatgagcaaagtttactggccgttatatgaagtgttcgttcgcagcaaacaggggttatcccatcgtcacgtcggcagtctgcacgctgccgatgatcagatggctctggagaatgcccgcgatgcctacacccgccgcagcgaaggctgctcaatttgggtggtgaaggccagcgaaatcgttgcttcgcagccggaagatcgcggcgaattcttcgacccggcggaaagcaaagtctaccgtcatccgactttctataccgtgccggacggcatggaacatatgtgaggcggcgatgaataaccctaaccccgtagccacctacgccctgcgtcttggcgacaatggtctggttctggcccagcgtttaggcgcctggtgcggccatgctcccgagctcgagatcgatcttgcgctggccaacatcggcctcgacctgctcggccaggcgcgcaattttttaagctatgccgccgagcttaacggctgcggcgacgaagatacgctggcctttggccgcgatgagcgccagttcagcaacctgctgctggtggagcagccaaacggcaattttgccgacactatcgcccgccagttctttatcgatgtctggcacgtcgctctgtttagccgcctggtgaacagccgcgacacgcagctgtcggccattgccgccaaagggctgaaagaggtgcgttaccaccagcgctttagccgtggctggctggagcgtctgggtaacggcaccgagttatcaaatcgcaaaatgcagcaggcggtcgacaatctgtggcgcttcaccggcgaattattccttgccgatgaagtggagctcaacctggttgagcagggcattgcggttgatccgcgtgcgcttcaggccgaatggcaaagcgcggtacacacggcgctgctcgactccggcttacagatcccgcaagaagcggccttccgcagcggcggcaaacaggggctgcacagtgaacatctcggcccactgctggcggagatgcaatatctacagcgttcgcatcccggactgcagtggtaagtgaggtgactatgcaacgtcttgccgatgtcgctcctgcagaggttcgcaccatctggggattattaagcgcgatcccggatccggaagtgccggtactcaccatcaccgacctcggtatggttcgcagcgtcgcgcgccacggagacggctgggtgattggctttaccccgacctattcgggctgcccggcgacggagcatctgctgggcgagatccgtacggtcatgagcgagcatggctttctgccggtgcatatcgtcctgcagttagatccgccgtggaccaccgactggatgagtcaggatgcccgcgagcgcctgcgccagtacggcatcagcccgccccaggggcatgcctgccatgcagacatgcccgttgaggtgagctgtccgcgctgcggcagcacccatacctcgctgattagtgaattcggttccacggcctgcaaagcgctctatcgctgcgacagctgccgggaaccttttgattactttaaatgtatttgaggttgccatgacgacgttccattcgcttaaggtggcgagagtcgagccggaaacccgcgatgcggtgaccatcacttttgcgattccgcaagccctgcaggcggagtactgctttcgccccggccagcatctgacgctaaaagcccgtctgggcggcgaagaactacgccgctgttactctatttgtcgcagtcgcacgccaggcgaaattagcgtcgcggtcaaagctatcgacggcgggcgcttctcgcgctacgcccagcacgatatccagcagggtatggagctggaggtgatggtgccgcaggggcatttcggttatcaaccgcaggccgaacggcagggtgagtatctggcgattgccgccggttccgggatcacgccgatgatggcgatcattagcgcgacgctggcgaccgagccgcaaagccgctttacgctgatctacggcaaccgcagcagccatagcatgatgttccgccaggcgctggccgatttaaaagaccgctatccgcagcgcctgcaggtgatacacctgtttagccaggagtcgatggacagcgatctgctacaggggcgcattgacggcgacaaactgcgccagctcgctgaccatctgctggatttcagccgtttcgacgaggcctttatctgcgggccggcggtgatgatggacgaggcggaagcgacgttacgtgaacttggcgtagcggagaaatcgattcatctcgaacgctttaataccccaggcggcaatgtgaagcgcgccgctggagtgcaggcggaagggcgcacggtgaccatccgccaggacgggcgcgatcggcttatcgccctcagcgccgaagacgacagcatcctggatgctgcattgcgtcagggcgccgatctgccgttcgcctgtaagggcggggtatgcgccacctgtaaatgcaaagtgctacgcggtgaagtggcgatggccgctaattacagcctggaagcggatgagctggcggcgggctacgtgctgagctgccagtcgttgccgaccagcggcgatgtggtggtcgactttgacgcgcgggggatggcatgagcgaactgctgatccaccgtcatggccgggtgcttcagttgacgctgaaccgcccgcaagcccgcaacgcgctaaataatgccctcttaacccagattgccgaggtgctggaggccgcgtcaattgatgacagcgtcagcgtctgcgttattcgcggtaacgcgcgttttttcgccgccggggctgacctcaatgaaatggcggaaaaagatctgcctgccacccttgatgatattcgcccacggttatgggcgcgaatcgatgcctttactaaaccgctcatcgcttcggtcaacggctacgcgcttggtgccggctgcgaactggccctgctgtgcgacctgattgtcgccggcgacaacgcccgctttggcctgccggaaattaccctcggcattatgccgggcgctggcggcacccagcggctgatccgcagcgttggcaaggcgctggccagccggatggtgctgagcggcgagagtattgacgcccgccaggcgcagcaggccgggctggtcagtgatatccatccggcggcgttaaccgatgagtatgccctgaaactggcaaccaccattgcccgccattcgccgctggcgctacgggcggcaaaacagtcgctgcgcctgtcgcaggaagtcagcctgcaggccggtctgcaacaggagcgccagctgtttagcctgctgagcgccaccgaggaccgccgcgaaggcatcgacgccttcttacaaaaacgtacaccggaatttaaaggacgctaatcgtggaagctttcattctcagcgcagtggaacagggcgtcatgaccattaccctcaatcgcccggaccgcctcaacagttttaacgatctgatgcatcaacaactggcggaatgtctgaatcaggccgagcgcgatgacggcgtacgttgcttgctgatcaccggcgccggtcgcggcttttgcgccggccaggatttgaacgatcgcaatgtcgaccccagcggcccgccgccggatctcggcatgtcggtagaacgcttttacaacccgttagtgcgccgtctggcggcgctgccgaagccggttatctgcgcggttaacggcgttgccgccggcgcgggcgctaccctggcgctgggctgcgatatcgtgctggccgcgcgttcggcgaaatttgtgatggcgttcagcaagctcggcctggtgccggactgcggcggcagctggttcctgccgcgtgtagccggtcgcgctcgcgcgatggggctggcgctgctgggcgatagcctcagcgcggaacaggccgcgcagtggggaatgatctggcaactggtggacgattcagaactgacggataccagtctacaactggcgcgccatctggcggcgcaaccaacgtttggtcttgggctgattaaaaaggcgctgctggcttctgaaaccaatagtctcgacgcgcagctggatctggagcgcgattatcagcgcctggccggacgcagcgatgattaccgcgaaggggttagcgcgtttctggccaaacggccaccacagttcagcgggaaataggccatgacaacatcctttgccaccgtggcggtgattggcagcggcaccatgggagccggtattgccgaagtagccgctaccgccggacatccggtgcgtattttcgatattaatcaaaccgcgattgcccaggcgatcgacggcattgctatgcgtctcgcctcacgggtcgagcgcggcaaactggcgttagaacaggccgacgcgctgctggcgcgcctgcatccggctcacgatttagccgcgcttgccgacgcggatttagtaattgaagcggcctctgaacggttggaggtcaaaacggcgctgttcgcacagctggcggagatctgcgcgccgtcaacgttgttgaccagtaacacttcgtctatttcgattaccgccatcgccgccggggtcaaaaacccggagcgggtggccgggctgcacttttttaatccggcgccggtaatgaagctggtcgaggtggtgagtggcctggagacgtctgctgaggtggtagagcagctgtgccagtgcgtaagcggctgggggaaacagccggtacgctgccgctcaacgcccggttttattgttaaccgcgtagcgcgtccattctacgctgaggcctggcgcgcgctggaagagcaggttgccgcccctgaggttatcgatgccgctttgcgtgacggcggcggttttccgatgggaccgttggcattgactgacctgattggccaggacgtcaacttcgccgtgacctgttcggtgtttaacgccttctggcaggaccgccgctacctaccatcgctactccagcaagagctggcgctgggcgggcggttgggtaaaaagagcggccacggcgtctatcgctggcccgctgagacgcagccggacgcggggctgccgccggtatctactggcgctcaatccattacggttgtaagtgacagtgtcacagagctcgatgagctcttgttgctagagaccgaaggcgagaccgcgttggcgctaagcgttaagcatcaccgcccggtggtggtgtatgacctgtgcgccagcgatacggtggtgctggccgcagcggcgaccaacgcgcctgcggccactgacaaggccgtgcattacttccaacagcagggcaagaaagttctgcgtattgccgattatcccggcctgctggtgtggcgcacggtggcgatgctgattaacgaagcgctggatgcggtgcaaaaagggatcgccagcccgcatgatatcgataccgcgatgcgcctcggcgtcaattatccgcacggcccgctggcgtggggagaacgccttggctggcggcgggtgctgcaactgctggagaacctgcaacaccattatggcgaggagcgctatcgccccagttccctgttgcgccagaaggcgctgatggagaagcaccatgagcaatgatgcgtggcgcaatgcgcgcgtgatgtacgaaaaagatacctgcgccagaaagatggggatcgaacttatcgaaatggacgatggttttgcgcagatgagcatgaccgtctcggcggacatgcttaacggccatcaaacctgtcacggcggtcagctatttacgctcgccgataccgctttcgcatacgcctgtaacagccaggggctggcggcggtggcttcggcggcaagcattgattttcttcgtccggcgtttgccggcgacaggctggtcgccaccgccagagtcaaacagcagggcaagctaaccggcgtctacgacattgaaattgttaatcaacagcaaaaaattgtggccctgttccgcggtaaatcgcaccgcatcggcggcacaatcacgggagaagtgtaatgcgcgacgcctttatttgtgacgggatccgcacgccgattggccgctacggcggagcgctggccggcgtccgcgccgacgatctggcggcgattccgctgcgtgagctgctgagccgtaaccccgggctcgacccggcagcgattgatgatgtgattttcggctgcgctaaccaggccggtgaagataaccgcaacgtggcgcacatggcgacgctgttggccgggtatccgcataccgtaccgggcaccacgattaaccgtctatgtgggtctggtctggatgcgatcggctttgccgccagggcgatcaaagcaggcgatgccgatctgctgattgccggcggcgtggaatcgatgtcgcgcgcaccgttcgtgatgggaaaagccagcgcaccgtaccagcgtcaggcggaactctttgataccacgattggctggcgttttgtgaacccgctcatggcgcaacaattcggaactgacagcatgccggaaacggcagagaatgtagctgaattgttaaatatcagccgagccgatcaggacgctttcgcctggcgcagccagcagcgcacggcgcaggcccagcgcgacggcattctggcgcaggaaatcgtgccggtgcagatcatcggcaagaaaggggcggtcagcgcggtacgcgatgatgagcacccccgcccggaaaccacgcttgagcaactcgcgctattaaaagcgccgttccgtaaaggcggagtcattacggctggaaatgcttccggcgttaacgatggcgcagcggcgctgattatcgccagtgaacagcaggccagcgtacaggggctcacgccgcgcgcgcgtatcgtggcgatggcgacggcgggtgttgaaccgcgcctgatgggactggggccagtaccggcagtacgtaaagtgctggagcgagccgggctcaatattaacgatatggatctgattgagctgaatgaggccttcgccgcgcaggcgctgggggtgctcagacaactcggcgtgccggatgatgcggcgcacgtgaatcccaacggcggcgccatcgcgttaggtcatccgctgggcatgagcggcgcgcgactggcgctgagcgccagccttgagctgcaacgccggggcgggcgttatgcgctgtgtacgatgtgtattggcgtgggtcagggcattgccatgatcctcgagcgagtgtgagctaatttacctgcgagtaccctacaatgataactactacaaaattagatccgattgaaaccgcatcgcgtgatgaactgcaggccctgcaaacccagcgcctgaaatggacgctcaagcatgcgtatgaaaatgtgccgatgtatcgccgcaaattcgatgccgccggcgtgcaccctgacgactttcgggaattaaacgatctgaaaaaattcccctgtaccaccaaacaagatctgcgtgacaactatcccttcgatacctttgcggtgccgatggagcaggtggtgcgcattcacgcctcttccggcactaccggcaaaccgacggtggtgggatatacgcaaaacgatattgataactgggccaatattgtcgcccgttcgctgcgtgcggccggtggttcagcaaaagataaaattcacgtcgcctacggctacggcttgtttaccggcggtcttggcgcgcactacggcgcggaacgtttaggcgcaacggtgatcccgatgtccggcggacagaccgaaaaacaggcgcagctgatccgcgacttccagccggatatgatcatggtgacgccgtcttactgtctgaatctgattgaagagctggagcgccagatgggtggcgatgcccgcggctgttcattgcgggttggcgtctttggcgccgagccgtggacgctggcgatgcgcgcggaaatcgagcgccgcctggggatcaccgcgctggatatttacggtctgtcagaggtgatgggaccaggggtggcaatggagtgtctggaaaccgttgacggcccgaccatctgggaagaccacttcttcccggaaatcgtcaacccggacgacggtacgccgctggatgatggcgagcatggcgaactgctgtttaccacgttgaccaaagaagcgctgccggtgatccgctatcgtacccgcgatctgactcgcttgctgccggggaccgcgcggactatgcgccgcatggatcgcatcagtggacgcagcgacgatatgctgattatccgcggggttaacgtcttcccatcgcagctggaagaggagatcctcaagtttgaacacctggcgccgcactatcagttagaggtcaatcgccgcggtcatcttgattcgctggcggtacgcgttgagctgaaagagagcgggctggcgttaagtcatgaacaacgctgccagatttgtcatcagttgcgtcaccgcattaagtcgatggtcgggatctctaccgatattactatcgtcaactgcggcagcattcctcgctctgaagggaaagcctgtcgggtattcgacctgcgtaaagcggtggtcagcggttaattctctccccggtagcccggctgaggcctttacgccgtaagccgggaatttcctgtgctatgattcataaaggaaaaatataacaacagaatgaatcagatgagtaaactcgacgtctttattcaacaagcggtgacggcgatgccgatcagcggcacgtcattaattgcctcgctgtatggcgacgccttattacaacgcggtggggaagtgtggctgggtagcgtcgcggcgctgctggaaggattaggttttggcgagcgctttgtacgcaccgcgctatttcgcctcaataaagaagagtggctcgatgtcgtgcgtatcggccggcgcagcttctatcgcctgagcgataaaggactacgtctgacccggcgcgcggaacataaaatttatcgggcgaacgccccggaatgggacggaacctggctgctgctattgtcggaaggattagaaaaaacggttctggcggaagtcaaaaagcaactgctatggcagggatttggcgcgctggcgccgagcctgctggcctcgccgtcgcaaaaactggccgatgtccaatcgctgctacacgaagcgggtgttgccgaaaacgtcatctgttttgaagcccattcgccgctggcgctctcaagggcggcgctgcgcgatcgcgtagaggagtgttggcatctcaccgagcaaaatgagatgtacgaggcgtttatcgcattgttccggccgttactgccgatgcttcgcgacagcgatccgtcagagttgaccccggagcgctgtttccagatccaactgctccttatccatttctatcgtcgggtggtgcttaaagacccgctgctaccggaagagctcctgcccgcgcattgggccgggcaaacagcgcggcagctgtgcatcaatatttatcaacgcgtgacgccaggcgcgctggcctttgtcggcgaaaaaggcgaaagctcagttggcgagcttcccgcgccgggaccgctttattttcaacgctttggcggtttgccgggcgtctaaggaggttgcatgccgatttatcagattgatgggctgacgccagtggtgccggatgagagctatgttcatccgacggcggtactcattggcgacgtgatcctgggaaaaggggtctatgttgggcctaatgccagcctgcgcggcgacttcggccgtattgtagtaaaagacggagccaatattcaggataactgcgtcatgcacggcttccccggccaggataccgtggtggaagaggacggtcacatcggccacggcgcaatcctgcacggctgtgtgattggccgcaacgcgctggtgggaatgagcgcggtgattatcgacggggcggtaattggcgaaaatagtattgtcggcgcttcagccttcgtaaaagcgaaagcggaaatgcctgctaaccatttgatcatcggcagcccggcaaaagcgattcgtacgctgagcgaacaggagctggagtggaaaaaacacggtacccgtgaataccaggtgctggtcgaacgttgtaagcagacgctgcatcaggtggagccattaaaagagatggaggccgggcgtcagcgtctggaatttgacgaaaacctgcggccaaaatcctaaacctgaggggtaactataatggcagagaaattatccgctcactgtcactgcggtgcggtggcatttaccgttgagctcagcgatggcttcaacaccgttcgtcgctgtaactgttcatattgtcgaatgcgtggggcggtcgcggtctcttcgccgcgttcaggaatagaggtggtacgcggaagggataagctcacagagtatcgctttaatacgggggaagccgtgcactttttctgctcggtatgcgggatctacacctttcatcaacggcgatcaaacccgcagcagtatggggtgaatgtggcctgcattgatggcgtttcgcctttcgattttccttgcgtggaggtcaacgacggcgtgaatcatccaaaagatggcggcggaggcgtggtggggtatttgcgctacgagcaaaagtaaaactctcctcccgcaggcagcgagaggagtcaaatattaggctgcaactacgctgtcgatagccgctttggcatcggactgcgctttggccgcaacttctgggccataagcaataccctctgcaaacacgaagttcacgtcggtgatgccgataaagccaaggaaggtggtcagatacggcgtaaccagatcggtcggcgtatctttatgaataccaccgcggctggtcagtacaaccgcgcgcttaccggtgaccaggccttccggacctttctcggtgtaacggaaggtgacgcctgcgcgggcaaccaggtcgaaatagtttttcaactgagtcgggatgttgaagttgtacatcggcgcggcgataacaatcacatcgttagctttcagttcagcgatcagctcatcggacagtgccagcgcttcctgttgacgcgcagtcaactgtgcatcgctcggacgcagcgcgccaaccagttcaccatccagtaccggaatcgggtttgccgccagatcgcgcacggtgataacgtcgcctgcgtgtttttcacgccattgttcaacaaaatagtcggacagttggccggattgcgagtaccctgcaagaatactggacttcagaactaatactttgctcatgggtgtttccttttaatgtgattgacgggtcaatgccctggtgcttgttgacactgtattcacaatcatgccgcagagatagcgcaatatatcgaatcctatgttcaatatttttgaacaaggcatgaattctacagatgtggtaatctacagcaatatttcatgagagatttttccggcagagcactgcccgataacgttatgacagaacaacaaaaaatcactttctcgcagctctatgaacggctcgatggtctgatgctgcgcgataaatcgcgttacagtcgccgcctgcatggcgcaaagaaggttaaaaatcctgatgcccagcaggccattctgcacgagatggcgcgggagatagatcaggcagcagggaaagtcctgctacgcgaagccgcgcgtccggcaatcacctatccggaaaacctgccggttagccagaaaaaacaagagattctcgaagcggtgcgcgatcaccaggtggtgatcgtcgccggtgagaccggttcaggtaaaaccactcagttacccaaaatttgcatggagctggggcgcggcctgaaaggcctgattggccatacccagccgcgtcgactggcggcgcgcaccgtcgctaaccgtattgccgaagagctgcagagcgagccgggcggctgtatcggttataaagtgcgcttcagcgaccacgtcagcgaaaacaccatggttaagctgatgaccgacggtatcctgctggcggaaatccagcaggatcgcctgctgatgcagtatgacaccatcattattgatgaggcgcacgagcgcagtctgaacatcgattttctgctgggctatctgaaagagctcctgccgcgccgcccggacctgaaaattatcattacctcggcgaccatcgacccggaacgtttctcaaagcatttcaataatgcgccgattatcgaagtctccgggcggacttacccggtggaagtacgttatcgtcccattgttgaagaggcggacgatagcgaacgcgatcagctacaggcgatctttgatgcggttgacgaactggggcgcgaagggcccggcgatattctgatctttatgagcggtgagcgggaaattcgcgataccgccgatgcgttgaataagctcaatctgcgtcataccgaagtgctgccgctgtatgctcgtttatccaatagtgagcaaaaccgggtcttccagtcccatagcgggcggcgtattgtcctggcaaccaacgttgccgaaacctcgttgacggttccgggcatcaaatacgttatcgatccgggtaccgctcgcatcagtcgctacagctaccgtacaaaagtgcagcgcctgcctatcgagccggtatcacaggcctccgctaatcagcgtaaaggccgctgcggacgtgtgtcggaaggtatctgtattcgtctttactcggaagacgatttcctgtcgcggccggagtttaccgacccggaaattctgcgtaccaacctggcctcagtcattctgcaaatgaccgctctggggttgggcgatatcgccgcgtttccgtttgtcgaagcgccggataagcgcaacatccaggatggcgtgcgcctgctggaagagctcggcgccatcaccaccgatgagcaggcaacggcctataagctgaccccgctgggccgccagctcagccagctaccggtggatccgcgtctggcgcggatggtgctggaagcgcagaaacatggctgcgtgcgtgaagcgatgatcatcacttccgcgctgtcgattcaggatccgcgcgagcgccccatggacaagcagcaggcatccgatgaaaagcatcgtcgcttccacgataaagagtctgatttccttgcgtttgtcaatttgtggaactatctcggcgaacaacaaaaggcgctctcctcgaatcagttccgccgccagtgccgggtggatttcctcaactatttacgcgtgcgtgaatggcaggatatttacacccaactgcgccaggtcgtgaaagaactcggcctgccgatcaacagcgagccagcggagtaccgtgaaattcataccgcgctgctgaccggtttgttgtcgcatatcgggatgaaagactccgataaacaggagtataccggcgcccgtaacgcccggttctctatcttcccaggctccggactattcaagaagccgccgaagtggacgatggtcgcggaactggtagagaccagccgcctgtggggcgcattgccgcccgcattgagccggagtgggttgagccggtggcgcagcatctgattaaacgttcatatagcgaaccgcactgggagcggtcgcagggcgcggtaatggcgacagaaaaggtcaccgtctacggcctgccgatcgtcgccgcgcgtaaagtgaactatagccagattgacccggcgctgtgtcgtgagctgttcatccgccacgcgctggtagaaggcgactggcagacgcggcatgccttcttccgcgataacctgaagctgcgcgctgaaatcgaagagctggagcataagtcgcgccgtcgcgacatcctggtggatgacgagacgatgttcgagttttacgaccagcgcattagccacgatgtcatctccgctcgccactttgataagtggtggaagcaggccagccgcgaaacgccagacttgctcaattttgaaaagagcatgctgattaaagagggggcggaacaggtcagtaaactggactacccgaatttctggcatcagggcaatcttaaactgcgtcttagctatcagtttgaacccggtgcggatgccgatggcgtaacggttcatattccgttgccgctgctcaaccaggtagaggaagccgggtttgaatggcagatccccggcctgcgtcgcgagctggtcatcgcgttaatcaaatcgttgccgaaacccgttcggcgtaatttcgtcccagcgcctaattacgccgaggcgtttttaggccgtgcgacgccgctggcggtgccgctactggattcgctggagcgtgagctgcgtaaaatgaccggcgtaaccatcgaccgcgaatcctggcagtgggatcaggtgcccgatcacctgaaaatcactttccgggtggtggacgacaaaaataagaaactgcaggaagggcgctctttgcaggcgttgaaagacgcgcttaaaggtaaagttcaggagacgctctcggcggtggccgacgatggtattgaacagagcgggctgcatatctggagtttcggcaccctggcggagagttacgaacagaagcgcggtaattataaggtgaaagcctggccggcgctggtggacgagcgtgacagcgttgccatcaaactgtttgataatccacaggaacagcagcaggcgatgtggcgtggtctacgccgtttactgttgctcaatattccgtcgccgattaagtatctgcacgagaaactgcccaacaaagctaaactgggactctatttcaacccttatggcaaggtgctggatttgattgacgactgcatctcctgtggtgttgacaagcttatcgatgaagccggcggcccggtgtggaccgaagagggctttagtaaactgcacgataaagtgcgcgccgaactgaacgacacggtggtcgatatcgcgaagcaggtcgagcagatcctgacggcggtatttaacatcaataagcgtctgaaagggcgggtagatatgacgatggccctggggctgtcggatattaaagcgcagatggcgggtctggtttatcgcggctttgttaccggcaacggtttccgccgcctcggcgatacgctgcgttatctgcaggcaattgaaaagcgtcttgagaagctggcaatcgacccgcatcgtgaccgcgcgcagatgctgaaagtcgagagtgtgcaacaggcgtggcagcagtggttgaataaactgccgcctaatcgccgcgatgacgacgacgtacaggagatccgctggatgatcgaagaactgcgcgtcagcttcttcgctcagcagttgggcacaccgtatcccatctcggacaaacgcgtgttgcaggcgatggagcaaattacgccgtagcctggctggttgtccccggtggtgttgcgcttaccggggctactggtcaggcgtccacgctcaagcgtttacccacgccagagtaaagccgtcccagcctttagtgcccacggtctgcagcgccgttgccgtcaaccgtggctcggcgcccatcatctcaatgaattgacgcacgccctggacgcgctcgtcggcgctctgtgggttgaccacttcgccgtcgcgtaccacgttatcgccaataattaaggttcccggcgggaataacgtagcgcccagcgcagataatggggattattcggcttatcggcatcgatgaagatcaggtcgaaagcgggacattcgccaagcgcctccagggactgtaacgctggcccctcccgtagagtgacccgctggtcaacgcccgccagctgcagattctcccgcgccacctgggcatgatgcgcgtcggcctccagcgtgagtagttggccgtcgtcaggaagctcgcgcgccatccagatggtgctatagccgccgagagtgccgatttccagtatccgcttagcctgggtaagccgtaccagcagggcgagaaactgcccctgattggcagcgacatcgtgtgccggcagcccggcacgatgattgttttccagtacccgatcgagcacagcatcgccgggaattaaggcctcaatcaaataattgtctactgctgaccactgttgttgcatatgacgcttccccatttagttccctgatgagtcagaccagccgcctcccagcgcccggtacaaatcaatctgcgccagcagcaggttatttttcacctgcaccacgctcaactgagtggagaacagagtacgttgcgcatccaacacgtccagataggaagagtagccgttacgatagcggttctgcgcgatacgcaacgtctctgcggcgaccgattcctgctcctggagctcggttaactgttcgccgtagcggctgatggcatccaggctatcgttcacctctttgaacgcgccgcgtacggttttctcatacccgtataacgcctgattgcgctgggccatcgagacatcaacctgcgcatttagcgcctgacggttgagtaacggcgcaaggatactgccgccaatattccataggcgcagcggattatcgagcagatccggcagcgtccggtcctgcaggctgccggtggcggtcaggttgatggaaggcagcaactgcgcctgcgacgacgcgagggtggcatcagctgccaccagttggcgttgagcctgcacaatgtccggacggcggctcattagcgtcgagggtagctgtgagggcagacgtagcgggctaagttgtgcgaattcgttacgttttaccgaaccgggattgtcgcccaacagaacgctcagggcgttctcctgctgagctatttgatgttgcaacggcgggatctgcgcccgcgttgagcgtagttcggaatccgcctgcatgagctccaggcgggaggtatagccggtttcatactgccgtttagccagattccacgcatcttctcgcgatttcagcgtttggcgagtaacccgcaactgctcatctaatgacaacaaggtgacgtagccgacggcgaccgatgtcgccacgctcagattagccgcggcggcagcggctttctgcgcttcaaggctggcttcggcggcgctggcggcgctgcggttggccccccaaatatcgacgtcatagctggcggtcaggccccctttgtacagcgtgctgtggatgggtagaccggtcgcggcggactgtgcgcgagcgcgggtaccggtcaggctggcatcaagcgaggggaataagctgctatcagcggcgtaggcacgcgcctgatactcgttaacccgctcacgggcgatcaggacgtcgctgttgtagcgcaacgcccgatcgacatactgattaagcgcgctatcgtgaaaattgcgccaccacacgccttccaccgggctggaaggacccacatcggcacgccaggcggctgggatcgccagcgtgggctctgcacgttgtacatcggcagactgacaaccgaccagcgccagcgtcacggcaagggttaacgggcggatcattgtttattctccgcgcgggtatcaatcgtcacctgcaccgacatacccgggcgtagacggtggctgtttttctgcccctcatcgaccgcgatacggacggggatccgctgggcgattttgacaaagttgccggtcgcgttatccggcgagatcgcgctgaattcgacgcccgtcgctggcgaaatactttgtaccttgccgtggaatgtttcgctgttcaacgcatcgaccgagaaggtgaccggctgaccgacgcgcacctcggcgagctgcgtctctttcaggttggcgataacccagtgctgaggcggtaccagcgaggtcaaatgcgtacccgcgctgacataggcgccgaggcgtacggagatttgccccagttgcccggttgtcggggcaataattcgcgtattctgcaggtcgatttcggcaagctccagcgccgctttggcgctggccacgtcggcttccagcgaatcgcgattgacgatagtggactgcagatcctggcgtgacatctccagtgtggctttcgcctgttcgatatcggcagcgccctgagccgcgctggcccgcgcggagtcgcgttcgcgaatggataacgacccatccgcggtaagctcctgtacgcgttttaaatcggcctgggttttctgattctgcgcgcgggcgttttgcaaggcggcctcgtttttggcgatcgtcgcttcggcgcttttccgctgctgctggttgtttttcagcgccgcttgtttcatcgccaacgttgcctgcgcctggtgcacccgctgcttataaatgcgatcgtcaatctggaacagcacctgtcccggctgaacggtatcgaaatctttgacgttcaccgcggtgatatacccgttaacctgcgggctgataaacgtcgtctgaccgcgcacgtaagcgttatcggtaaactgactatgccgggtgaaagggggcaactgccaggcgtaaagaataaccaatacgccgacgatgccgatcgccgcggcggtaaaaatagacaccacgcggatgttgtttcgggtattggcctgttgcctggccgcgtcctgctgactcataaccactccagagtaaaaattatcttattatttgttgccggttgcgcgttttaacgcgatacgggcggtgattcgcaatctgattaagcgccagaaaatccacaccagcgttgcgccggagatcgccgccgtcaggagataagtgtcattgtaggcgagaatattggcctgtagcgtcgaggcgttttgcagcagcgtggtagcctgcacgttcaatagcgtgctgtcgccaatctggctttggtacatctggctatactgctgcagtcgctcggcgatcaaggggttcaacgtggttatctgatcggccaactggctggaatgaaatttttcgcgccaggtctgaaaagtaccaaggatagctgagccgagcaggccgccgatattttggctcatgccaaacagtaccgagaagctgaccagattccgctggtcggcaatcaccccgccaattcccgccagcatggccggcgccaggaagaaggcgctgccgaagcctagtaaaaactggctgaacatcaactgttccggacgggtcagggcagtggactgactatcaagcaaggaggcaatcataatcaacgccagcgcggtcgcggtgggccagtagaggcgctgcgggttaagcgtcaggcaactggcgacgataccgcagacgataccggcgaaaatcgaccatgccaggttggtcatctgctcgttttgcaagccgacgtactgcagccagccgatgactccggtattctgttccgccagcacgatgcgaatcagcagcataatcagtcccagacgaaggatactgccgctggaaagccatttggtgttaagcagcgggttagcgcgattatgctcgaaggcgatagccgaaacgatcagcaccaccgctcccgccagcgaccagccaagccacggcgcctcaaaccaccagtccagacggcccagcgacaggaccgcgcagactaaagccataccgggcgccagcaggaagaaggtaataaagtccttcttctcaaacacttttttgcggtcgctcggcggcagtttaagcgcgatgacgcaggcgagcgacaccagcgccagcccgagctcaaagaagtagagcccgcgccattcgtcaatctgcagcagttcagtcgagaacagacgcgccagcgggatcgccagcgacgatccagtgatcccaatggtcaacgccttcagacggtggcgcgctggccaggcctgcacctgatagtaaattcccagtgaactcaacgccgctgccaccatgccgtgcgccgcgcggaccatcattgccgagctgaggtcgttgacgaacaggtggaagaaagtgaccagtacatacagcaccaggaagccttcggtaaaggcgcgcaggccaaactgttggcgaaatttcaccagcagcaggttgatggaaacgttagtcatgacgtaaaccgccggcagccacgcgatttccgtcgaccaggcggcaaaagtgccctgcagcagctgcaggttagcggtaacgacagcattacccagcgcgccggtcaggcacaccagcagcccgacgataccgtaagcgacacgttttggcgtactgtggagcggcgtcgacggcgaaccgagcatcgccggtttttcatgtggcgcccagtcgtggggcacatagggattagcatcgcgacgaggcattatttcttttccacctcgtgcagcagcttttccagtacccggtgggtttgctcacgttcttccgcagtgatggcggtaaggatctcctcgcgcaggtcgtcggcgaccgctttcacctgatggaaaagcgccatccctttggcggtggcgaccaacagacgcttacgtttatcgctgtcaggcttaacgcgctccaccagttcaagttcgaccaggcggttaatgagcgggacgatggtggcgctttcgacaccgagttcctgcgccagttcgctttgcgagaggggctgctcgttgcgggcaatggctgacaccgccacccatgacgcctggctcatgcctagattttttaaccgccggttaaccgccagccgccagtgatgcgcggttaagtataaaagatgggaaaagttaagctgtcggttatccatgttccgcctgcaaattcattagagctctaatgattttaggcgcggcgatttactgatttcaagcgtcaacgataaaaaaaggttaacgcattgtgctctttttgtggggaatttcagtgattttacagcctacgacagcgtggttttcagtaatcttgatgtagagactgcccgaagcgcgcagcgtaaaccgggaaactatcggaaacagcaatctgaatatttaagaaacgttattttaacagatataagcaaattgtatggtggtgtattcctctggcaataatttcaaaagcagttaatctcgctatttttatcattaagtgtaaagaccgatacacagttaacgcttatataattggttaatcgtaaaattataaaaactaaaaattaaatcttagcctctctaagtatcaaatctttagataaccatgcattttatttcgttctaatatcattttgctttttaaatgagaggggcatatgaataagttcgaaatctttcgtaaatctaattttgatgggttggttcatgaatatggacttgatggcagacgattacttccatgggataattatcccatgccatttgctggcggatggtgcgtagtgaggccgggaacccaaagtgaaccacatacacaaattgatcaggagatcttcatcgctataaaaggacaagccacattaattgtcggtgaggaacaatatgaattcaccactggcgatattgctgcgattccgaaacacactaatcattatattattaatgactctactgaagattttcatttctatgtggtgtggtgggatatgaattacgtaaacgactttattaatcaacataacgacacgacggggtgtttggatgtctaaatatattgtcacgattacaccacctacaccaaatggtgatttgcatattggccatatcgccgggccgtttttatctgcggatgtttttacccgtattcagcgtcaacgtggacatgagtgtgttttactttcgtactcagatgattaccagtcctacatgcaacgtaaagggattgaaactggtatcgagccgtccgtgcttgcacaaagcaataccgagaaaataaagcgttcattagcggcgatgaagatctccgttgataactggatgtcaccttataacaaccccttttttaaggatgcggtacaggaactgttcgattccgcgcatgaacggggggcgattgcgtttcacgactcttcggaaccatattgcgccagttgtaatgtctggggttacgaggcgtttggccggggttgtgcaactattgcggcgttgattccgacgccagccagtgtgaaggctgcgccaatgctccagatgccgacaaaatgcaggagtttcactgcaaactttgtcgtaaagcccccgagttcaccagcgtaaaccgcgcatttctgcaccttgaacgttttgccccgttattgcagaacgtacacgcaaagtacgtaaaacgtcgtccgttagaaagctggctggacacggccatcaaccaactcaaaccctggggcgtcacgcgtcctgaagaggcggggttggacctcgcggaagatggtaatcgtcgcgtccatacctggtttatgggtatggcgggttatatcgccgcttttcgtgaatacgcagcgcaacgccaggatgcggatctattctcacgtttctggtgttctggcgaaggcgaagttgtccattttctcgggtttgattgtgtattcagccatgccattgcttatccagtgctactcgatcaacgtcccgatattcatgtccgccagcgttttattccgaatcaattcctcatgctggatggcctgaatctgtcaaccagccgaaaccacgcgatctgggcgcgggaattggtggagaaagcggggagcgatagtgcgcgtctgtaccttgccagtattgcgccggaagaggaagagggggattttcgtcaaaacgaatttgaacgctggcatcaggctctctttgacgatttgctcccgcgcattttccatgcaatggaaacggaaaagatgagctggagccggcagctcaccggaccagatgccgggctcctcgatggattacgccagaagtggctcgcggcgggagatgccagccatttttcgatgaaagcactggcggccacccttcttgacgcgttcgctctgtgtcgcgtcaggttggatcagcatcagccggttgcgcacctggcggcgtttattgcggttgccggacaggcgttaatcccggagctgagccagcgtttaattacccaatttcgtttacctgaaaacgccattctttgttggttagtggatggcgcgctagctgattacaacatctaacgaggatacctatgaccatcggctgtgaagtttgcgtcattggaggcggggtgatgggggccaccctcgccgcatctctgtgcgaacgtaatgtggaaacggtgttgctggaagctggaactgttgcaggacagggcgcttccgcgttctcgggagggctggtccgctgctacgatcctgacccgacgattatggcgttgtcttcccatgcgctggccattcagcaaaaaacgcattttgctgaggtgtttagccgtgcaatccggcgcacgggcatgttgtaccgtgccgcgtccgcgcaggccgaccagattgcgcatcgactggcgagctattccagcgctgaataccctctgcgtaagctgtcggcaggggatgtggacgatatgtcgttaaatgtcgcgcgtcgaacggaccgggtgaacctctatgaaccaaatgctggtatcggcgatgtgcgattggcgacccggctaatggcaaatctggttatgcatcagggattgctgctggaacaggctcgcgtggaagagattgatatggataaacgcggtgagtgccgggttcataccaccaatgccactctttcttgccgggtagtggtgattgcggctggcgcctggagtcatcactggtgtccgcagcagatggtggtccggacgataccgctggcgcggctgtatggtgcggatttaccccgcattccagtgatcgatgccccggcaactgcctacgcgatcccgtcgggcagagatattgttcaggttggctgccaaccgcgctcgcaggtgccgcatgtcggcgcgttaccaactcccgatcaggagcataaacaggatgcgttgcggcgtttgcaggatatcaccggcgaaagtggtgggacgcgggttctggatgtgttaggggggtatgacagctatacccgtgatgggcggccaatgctgggatttacctcaaacagcggcgcgtgctacctggccacaggattgaacggaattggttttaagcttgcccctgcgctcgccgatattgcttctgctgaaatcagccgttttttacaacgcaagcggaagatcccacgggatcggtggcctgaattatctccggagcgtgaaggcgcgttaccggcattatcaacgctaaccctggtgaatcgctgatgaaaacgctaaaagtcggtattaccgcgctatttgatccgcaggtgacacgccatgccagaaccttcatgcgtgcgcttgccgtggcgcgcagtcgcattccgggcttatcaagggtcgagtttatctttcgggacgacggggcgtcgaaggaaacggcgctggtggtagggcgatattttattcaacaggaagttgatgttgtagttgggcatttttcatcggatgcggcgcttagcgcagcgcggcattatcagcgggcaggtatcccgttacttaccccagccgctacgatggatagtttgtgtgaacctgcacacggcgcgtttcgtttgtgtccgccggacaagcagttggcggtgaaactgattgatttcgccatcagccgttcatggatgaagcttgaggtaggcgctgacgaaagcgctcatgggatagctcttgccagcgcgatttctgccgaagcggtaaaacgcggacttaccgtggttgcgtcgggagggagtccggatgctgaggtttttgccgggcgactgggaaatagcagggaaaggatgttaacacgcgcgcagtcggactctaatcggcctctgattctgacagatgatgcggcttctcccggtttaggaaataagcctgataacggccatgaggtttacattgtcggtattccggcaattgcgacgccgttatcagatttattcagcgaatattgccgccagcattatggtgatgagccagaaacctattacatggagtgcattgctgcctttcaaattatttctcaattagctgaaggcggtgttaataattgcttgtccacgctcgctgaaaatgaatttgaaacggtgttaggtaaaatttatttcacccatggggaatgccgtcattcagcgcatacagtgtgggaacttacggagaatggctttaacgctattactttataaactctcttatatatcagggtatattatggatcatacatatctgcatgaccgggattttctttggcgtaatcaaaataattatgatgtggtgaatattggttttggtcccgcaggaattgcccttgcctgtgtgcaggaagatgcaaaggagtgtaacgcatcttacaaagatattaagatgctgcatctggaaaaagccgccgatactgtctggcatggagaactgttattaacaggcacggatattaatcatagcgtatttcgggatttagtaacgccacgcaatccgcgcagtcgcttttcattcgcaatgtatttaaaagagaagaaccggatgttcgacttcggtctgcttggcagacctgccagtcgacatgaatggtccgattatattcgttgggtgtccagccaggtcgatgaccatacgcttttttcaacaccagccaaagagatccaaccgattgtcaaaggcgatgagttacatggttttagggtagtaactgaacatgatgtctatacaacaaaaaatatcgtactgtcttcggggagtcagcccaatatcccggatcaatttctcccgtttcttggcgaaagggtatttcatacctcccagtttctgagtcgtttgaaatattttggcggaacgttgcctgcgcgttggttggtgctggggtccggacaaagcgccagtgaatcggtcattgaactgcttaaacgacgcgatgatatcactctgtactccgtgcatcgttcgtctggctttcgtctgactcagcttggccaattccctaatagagtgttctcacctgagcacgttgattatttccatcggttggataacgcctcacgccgacaatttctggagtggagcaaagcgaccaattatgcgggcatcgatcctgacgagagtcaaatgctgttttcatttgtgtatgaggatcgtatttgtggacgcgagagattacacatcaaaccgtggtgtgaaatcgtcgatgtttcccagtcagaaaacggttatcaaatcaccctcgccgatatttttagcggcgaagaagagattgtcgaggtagatgtcattgtgctggcgacgggatatcagcaaccacgtattccagcgttattgacgcaacttcaaccgtggctggtgcaggaccaggatggtggattacttattgaccgcgattatcgggtcgcgctgcgtgagacgaaaggggtgagtatttatgttaacgggctttctgagagaagccacggtattagcgacagccagtcattttcactcatggcgctacgcgctgagcggatcatgaacgcattacctgtctcaggagaggataattaatatgcacaaccatatttcagatatcgtccacgatcaggttttcctttccgtaaaagacgttggcccagatttttatttaaagatggagtcgctgaatcctgcaggctctatcaaactaaaaacggctattgggctggtcgatgacctacaacagcgaggcttgattaacgccgagaccattttgattgaatcttcttccggcaatctgggggtcgcattagccatgatttgtgcggaaagagggctgaaattcacctgcgttgtggacccgaatattgccgatcacaatttgcaggtgatgaagtgctacggggcggaggtggtaatgatccgccagcctgacaaaaatggcggctttcttggctcacgaattaactatattcgaagcaaactggcggaagatcctcgctatatctggcttaatcagtatgaaaaccaagccaacccgcaggtacatgccgcccgaaccgcacattccgtcggtcgtcagtttgcgcatgttgactatctgtttgtgggggcgggtaccaccggcaccctgatgggatgcgtggatcattttcagaaataccaccctgaaaccaaaattatagccgtggatagcgtcggttctgtgaccttcggaacgcctgccggtcggcgttatatccctggactcgggaccagccagattccgccaatctttcagcagaaaggcattcatgccctggaaatggttgatgagagcgctacggtggcaatgtgtcgttacctggcccgtcaccacggtatgctggtagggggctcaaccggtacggtaatcgctggcctctatcactggcgtgagcgcatcccgcaaggggccgttgtggtcgccctctctccggattggggcgaacgttatcttgacacggtatatgatgatggctgggtggcggagcgctatccgcaggaaacgctaagcggtgggctggagtgggttgacgccatggcgcaaccgacggtgtatctggaagaggcgtcttctatgccttttcacgtcgttgatggccggacggtggcatcagtccttaatgaagatcccctggcttgcattgatgacgtcgaaaaagcctatttggcgcactgcaacggcgataccgttaacccggacagctattttctacgttttcctgaaaaccaggctaatcgaattatcgccttgcccgccagtatagcgggggagaatggcagtaacggaataaagtggatttccagctatccggataatatcaaacaaggattacagcgcgcctctgccgtgcttcttttgaataaccctcagaccggttatgcctatgcatgcctggaagcgtcacgtattagcgcaatgcgtacggccgcgtcggccgtactggccgctcgtaaacttgtcgcgtcgcggaacattacccggttggggtttgttggcgcaggctttattgcgcgaaacattctcgatctttttcgccatgatggttggaatattgaaaaaaccgtattgcatgataaggatcaaccttccgtagaggcctttgccgaatatgcgcagacgcgccatcaacttatcgcctccgtcggctcacttgaagaggttttagcagccgatgtagttgtgctggccacgactgcaggaacgccgtatatccatgattattccttcaagccacaccaactagtgttgaatatttctctgcgtgacttatctcccgagattataacccgctgtaataatctgcttgatgatgtagaccactgcctgaaagcaaacacttcgccacatctggcagaacaattatgtggccatcgccagtttattaacggaacgctggctgaatttatgttaggccgggtggcattggatccgcgtaaagccacgctcttttctccctttggcttaggcattctcgacctggccgttggacagcgagtctatcagcgagcctgtcagcagggacgagccagggaaatacccaatttcttctttgagtcagggagatggtaaatatgcaaaaaccttcacgaatcgctattgttggtctggggccgagaggattagcccttcttgaaagcatgatctttgcccttcgggaatctccagacaaggttgtggaactgcatttatttgacgatggcgcgccaggatgcggcatccacgatgaatggcagccagattatctcatgcttaatacggttgcagggcagttatccgccttctcctggcatgaggatgataatggtcgattagggccaacatttctggaatggtgccatgcgcagacggttcgactggatgaacgaggctatcccgctcgttctggacgggtggtttcgccaggtgattttctcccgcgccggctattaggtcgctatctgcgggattgttaccagcaattaatgacgatggctcccgtcggattacgcctgtattaccataaaacccgggtaatggcgtgtacaaccgagcggaccagggagacatatttgctgcgctgccagtctggagaaagtgtagaagtcgaggcaatgtttttagcgctggggcacacggggcacgaaagtgtcattcccgcctcgtttatttctccggttcatgccggcatatggcctggtacggttgtcgaggataaaccggtgcagaaagtggcaatatcgggtttgggactcacggcgctggattccctttctcgcttaaccgaaggccgcggcggagaatatcagcttcaggatggcgagttgatttatcacccatccggcaaagagccgcaaatattcatgttctcaacttcgggattaccttttcatgcgcggccgcactggcagtcgggtgacgaaagagaggcgttacctcttatctttttgacctcggcgacaatccgcaagctacgtgaaaaaaatgccttcttacctctggattttatcgaacatattttaccgataattaaaatggagatgaaggctgcctattacctggcatgtgcgcgcaatcgttcgatggcaatcgccaaggatattcacgataagctctccgggcataatggtgaatattttatggcggcgttagtaaaagagtacggcccgttcgacccggatcgttatctcagttgggtaccatggccagtggccattcaggaatatgaagaggcattttgttgttggatccgggatgatattagagaaagtttacgtggcgtgaattacagtccgttaaaggcggctctggaaatatggcgccgcggacgcaatgttttacgtgaagttgtcaatcatcacggtttaaacgcggcctcaacgcaactcttttatcagcgatatgcgccgattgctaaccggctggtggggggccacatattgagcgctataatgaacttcttgccttaataaaggctgggattgtgcgtatattgcccccaatgtttgtggctgacgagggtaaacggttatacagcgtgaacaatccacaggaaatctgtgtggatgtagatgctgtaatttcggcgagagtatggccgagtggattaagccgtacacggtctccgctgttaatttcactgcgtgaacagaatcttattctgcccgcagggcaatatccatacgatggaatcgaaaccgataaatcaggaagagtcataaatggggataatgctaaacaaccgacaatatgggcttttgggccaatagtcgagggggcaaccttttataatcattatgtgccaacaccagataaagcgtgccaggccattctggagtctcgtctggcagttaagtcatgtcttgaaactattatgaaagccaatgaggaggttaccccttcaacaatgaaatagcttttttattttatctattctaatttacttaaattaaagaggtctatatgaacgaagcttcgttattattgacgctggctggcgcctttctggtacttattattagtccggggcctaattttgtcgtgattactcaaatatcagttagcatgtctcgattatatggtttgttcaccgggataggtgtagccagcggtagcataatatgggcacttttagccgctacaggtttaggactaattttccagaccgtgccgtggttacaacctgcattacaacttattggcgggctttatttatgctggattggctttaaaacccttaagagtgcgggtaatcaacctaaatcacgggatattgcgtcattaggtgttgaaagtgtcgggcgtgcatatcgctttggcttgttaactaacttaacgaatccaaaagcgttggcattttataccagtgtctttacgaccgtgaccgctccggggttggctgaatgggtacgtgttgccggcgtactaattattgcagttttggcgatgagttggttcaccttacttgcaactttattttcaattcgctggatccaggaacgttatcgcgcggcaaaaaaaggtgtcgatctgtttaccggcaccgtcatgatgatattcggtggcaaattgttgttgatgttggcgccgtttcttcattcaacctttggtcactaacgggaggatataatgacgttaagtaactgggattatccgactaaagttcgggccggaataggtcgtattaaagagctccctgagatttgccgtgaggcaggtatcaataatcctctactcattactgattcaggtatcagcggcactgatatggttaagcacgcgctgaatcattgtcgggataaattagggcagtgcggattgttcgacaatgtgaaaagtaaccctacaggtgaaaatgtcgcccagggggtggcagtttatcactctggccaccatgatggagtgatcgcgttgggcggcggttccgttctggatgctggtaaagctgtagcgttgatgtccgggcagcaatatcctctgtggatgtttgaagacattaaagggaactctgattgcgttaacgttgcgggaattgcgccgtttatcgctattccaactacggcggggacgggttctgaggtaggacgcgccgcggtgatcaccgacagttccgtaccggtaaaacgaaccattttccatcccgcgatgatgccgcgtgtcgcaattctcgacggcgagctgacggtgggaatgtctccgcaattaaccgcagccaccggcgcggatgccttaacccactgcctggaatcctggtgttctcctgtctatcatccgatgtcggaggccgttgcggtgaaaggcatgcagatgattaaagcaaacctgcttcgggcgtttcagaatggacaggatctgcaagcgcgtcaggagatgctggtggcatcggcactcggcgcggtttcttttcagcggggattgggcggtgtacatgcgatagcacaaagcctgggggctctttacgatggccatcatggtttgctgaatgccattgtcttaccttatgtactggcggcgaatcggccaaaaatagatgcctcgatggactatctggcacgggcgcttgatctggaaagacccggttttacgggcgttatggcatggatccttgagttgcgtcagtcgctggggattcctcatacccttttagaggtggggattgatgatcagcaagccacgttagtgggagagatggcttttgctgacggctgctccttaaccaatcctgtgcgccactccgcggcggattacagcaaaatcttctgtcaggccgtgaaaggagagctgtgatggcgctgaacactacgcgagcggtatctcctcaggcaatcaatcggctggagcgtgtctggcaagaggcggtacagcaaggactacccgtaggaggggaaattctgctctcacagcatggaaaacgcctcttccatgctgcgtcaggctggatggatcgcgaacaatcacggccgatgaccaaaggcgtcccgttccgtttagcctcgttaacgaagctgttgacctcggtggtggtaatgaaattcatcgagaaggggaaattatcactcgatacgccggtcaattcggtgctgccattttttaaacctgcgttagcaaacgggatagtaccgttggtgacgatccggcatttgctcacccatacctctggtttgagctatggatttgaacagcccgcgggcaatatctatgagcgttcgggaatttcagatggtttagatctgcctgcacatgaccttgaggagaatctccacaagcttggcgcggtaccgttactgttcgaacccggcagtcgctggcaatattccctggcgactgatgtgttgggctgggtgataagccagattgaaaacgatactttcgcgaatattgtcaaacgggaggtgacggatccgttgcggatgcataataccgcttttcatatttccgatgaatcactgctggcaaccccctatctgcaatctgggcgacggatgacggacaatgaaattcttccggtgggagagggcgtcgcccgcttatcgcccaaacgtgcgacgacctccaacgcctggtattccgcaggagcgggtttgattggaaccgcggaagattatcaccgtttgcttgaatgtctacgtcaaggcggagcaccaatactcagcgctgattctacagcacgcttattggcaaatgcgactgacgaaatggctatcggcgaaaggaatgctggatggggccatgggttgggttgcatggtactgttcgaccctgaaagagcgcaacggcgtgaaggagcgggtagctggagctggtttggcctctatggtagttattattgggtagatcctcgcgccggattatcattggtcatgttaacaaatacggcgggtgaaaaaatatggcgaacgcttgctgaaaaaattcaaacaacgctatgctcatagttctatattagaactcggcaagcacaaatttataaacacaacattcatcaaccttttattcgtagtgtcaaaggagtctgattatgactatgcagattgggatttatatttttgataatgtagaagtactcgattttgcaggcccgtatgaagtttttacctgtgcctccagagttaatcgggatgaaactcctctatttgaagtttttacagtaggtgacacattacgtcctgtccacgcccgggctggacttaagattgaccctgatttttccctggagaatcaccctgatattgattgtttgattattcccggtggcgtcgttaatgctgaactcgataagccaaacgtgattgaatggattgctaagcaggcattaacaacgaagattacggcatcggtatgtacggggcattcttactggcggcggccggggtattagaggggaaatcagcaactacgcactgggaagatattgccgatctgcgcgctatgttccctgagctttcggtgaaagaagggttgcgctgggtggatgaaggggcaattgtctcctcggcggggatttccgcaggtatcgatatgagtctacatttagttgaacggcttaaagacagagatcttgcgctaagaaccgcgaagcaactggaatttgactggacggaaaaccgaccctcagcgtagaaaatatcagccctggcgatgaaatatttcattggcagggcatttcattttattcagcaatataattaacttatggataatggcgcggtgataatcaaatgattattttatatttgcgtgcatgcattcatataacctggcgcaaaaccataatagacacttttatataaggaaggtatcgatgaaaatattttttctggaagtcgtccgtgctatagcagagttacactctttttccgaaacggctgcagcgcttaactgtagccagtcgaatattagttacgcggtcagcgaggtggaaaaatattttggtaagaaaatatttttgcgtaaccgtcgtggctgccagcttacaatagaaggagagagcgtggttaaaaaaatatctaatataatcgacattatagaaactataaaaaaaatgaggtcgtgggctgtgtgaaaatcatgcatacattgacgctgagcccgatactaatgaaaagaatcattgatttaatctggcgcgtagcgcctggggtgcaaacagaatggcttcaatgttccaccatagatgatgcgcttgatgccttgaaaagaaaccgctcggatatcatcattgcgcaactcgaacctcattctcatgattatgttgagtatctgcactggtttgatgattatcaactggtcacaggaataaatgatatgcccgaggctataaaaaagggcgatacggggaggtatctggcctacacccatgctggacagtctttattgcaaactcattctatcaaccagactctacccgcccatactaccttcatgagcgacgtatcggccatcatagaactcgttaccgctggtggttgctgttcaatattgccgagcagtgttttgccgctgcaggagcgtaaactcagatctacacctctcaaaccaccttgttccagacgtatcgcggttattgcacattccagttccctattgtcaggcgccacccgcaccacaatagagtgtttgaagaaatgccatcttcaaccgtttttttatacaactaacagcgttggctaacggcggaacgggatatcgccgcctgatagcaataaaaaacccgggcgagcccgggtttcgtatctggattacctggacattagcccgggtagatgccgcgatctttacgcgccagcagaatgcgctcgcaggcgacgatgtaggccgcggtacgcagagaacactctttctcggcggctttatcgcagacgtgaacaatagcatcggtcatgatgcggtccatcttggcgttgatctcttcttcgctccagaagaagctcgccatgtcctgcacccattcgaaatagctgacggtcacgccgccggcgttacagataacgtccggaaccacgatcaccccgcggtcggccagcacgtcgtcggcgtccggataggtcgggccgtttgcgccttcgaggatcagcttacagctgattttttccgcgcgttcacgggtgatttggccttccagcgccgccgggatcaggatatccatctcagtggtccagaaatcttctttggcgatttcacgcgcgcccgggaaaccagcaatcttcttgttctcggcctgccatgcggtcagtgcctgcatgtcgatgccgccttcgttgaacagggtcgcggtatggtcctggatcacgacaatgcgcgcgccaacgtctgcaaacagacgagcggcttcgctgccgacgttaccaaaaccttgcagcgccactttcgcgccttcgatttcgataccgttacgacgggctacttcacgaccggtgacgaagacgccgcggccggtggctttttcacgacccagcgaaccgccgagatgaatcggcttaccggtaaccacgccggtaatagtggtgccgtgattcatggaataggtgtccatcatccacgccatcactttaccgttggtgccaacgtccggcgccggaatatctttctgtggtccaatgataatgccgatttcgctggtatagcgacgagtcagacgttccagctcgccttcagacagtgagaacgggtcgacgcggatgccgcctttggctccgccgtaaggaatattgaccgcggcgcacttaatggtcatccaggcagaaagtgccattacctcgttaagatcgacatcaggatggtagcgaacaccacctttacccggcccacgcgatagattgtgctgtacgcgatagccttcgaaatggcggatggtgccatcatccatctgcactggaatatcaacgatcagcgcgcgtttcgggtgacgcagagtttccacccagtaggcgaggtcgcccagatacggcgcgacgcggtcgatctggcgcaggtaagtggtccatggagatgtactactttcagatgcgtaagataacttttccataagagtcctgtatctcaatgttatttgtgtcgtgtaaaaccgtggaataggtacagcagtaaaatctgtgtgatgaatgttatcaccaattttataaaccagtatttgacggctattccgaattttacatttttgttagttttttggggttgcatttgaataaataagcacggcaaggtgcctgcatgtcatgcatcaatatgcatattttatgcagataagtgaataaggaaataattttttcatatttttcattatcttgatgatcctctaaaagtgaataaaatgattcatggttgtattgactttgttgcgtatcagggcccagcattagctcacgcaatacacaaggtattaaccgtgaattaacatatatccatacaaataaaatggcttatttcagttgtggtgaaaatatttgtcatcgcagcgggacgtgtgcgccctgaaaacggctaaagggaaattgttaaattcgactattcacgattggccaatttatgccgccgatcctcgttccggagaattgttatgtcaggcagtatcactcgcgaagattttgatgcttatatggttccgtgtttcgctcccgcgccgtttatcccggtgaaagcggcgggctcccgcgtctgggaccagaagggtaaagagtacattgacgtggctggcggcattgcggttaacgcgctgggtcacgctaacccggccctgactgcggcgctgaaggcgcagctggataagctgtggcacatcggcaacggttataccaacgaaccggtgttgcagctggcgaaaaccctggtggagtcgaccttcgccgataaaattttcttctgtaactccggcgcagaagccaatgaagccgcgctgaagctggcgcgcaagtatgcgcacgacaagtttggcgccgacaagagcgaaattatcgccttcaaaaactctttccatggccgcaccctgtttaccgtgaccgtagggggcagccgaaatactccagcgattatgcgccgttaccgcaggacatcacccatctgccgtataacgatatcgacgcggtgaaagcggcgttctcttcccgcacttgcgcggtcatcgtcgagcctattatcggcgaaggtggcgtcatgccggcggatccgcaattcctgcaggcactgcgcgagctgtgtgatgagcatgaagcaacgctgatttttgatgaagtgcagaccggcgccgggcgtaccggccaactgtatgcttaccagcactacaacgtggttccggacattctcaccagcgcgaaagggctgggcggcggcttcccaattggcgcgatgctggcgaaagaggcctgggcgcaggtgttccagccgggtacccacggcacgactttcggcggcaacccgctggcggcgaccgtcgccaatagcgtgctggcgcaaatagatagtgcgctactggccggtgtgggcgaacgccatacccttatcgtcgataaactcaatgcgctgaacgccaaatatgatctctttagcgccgtgcgtgggatggggctgctgattggcgccgagctggcaagccatctgcgcggcaaagccaaagcgctgaccaatctggcggcggaagagggactgatcgcgctgatagccgggccggacgtactgcgtttcgccccggcgctcaatattcccctggcggatattgatgaagccttcgtgcgccttgagcgcgccgtcgcccgcttaaccagctaatccgggagacggcctatgatgttatttcgtcccgtacgggaaaacgacctcgatgatattgtccgcctggcctcccgggcgggcgtgggaatgacatcgctgcccaatgatgccgtgcgcctcgccgcacggattaaacgcagcgtagaaacctttgccggcaagctgacgcgcggcgaacaggggtttctgtttgttctggaagataccgaactgagccgggttgtcggcgtcagcgccattgaggtcgcggtggggctcgacgaaccgttctacaattttcgtattcagaagacggtacgggcatccaaagagcttggggtttacaagcatcaggatttgctcaatttaagctacgaccataccggtcacagcgaactctgtactctgtttcttgacccggagtaccagaagaaccgcaatggcctgttgctctccaaagcgcggtttgtctttattgccgcgttccgcgagtggttttcaccgcatctgttcgccgagttgcgcgggcgcagcgacgagcagggtaattcgccgttctgggatgcgttggggcaccactttttcgatattcctttcgccgatgccgaccgcctcaccggtacagggatgaaaacctttatcgccgaattgatgccggcttacccgatttacatctcgctgctgccggatgatgcccgcgaagtgataggccaggttcatgctaacaccgctccggcgcgggctattctggaaaaagaagggtttagctggcgcgggtccgtcgacatcttcgatgccggcccggtactggaagcagaaaccgataatattcgcgccatcagagagagctactcgctgccggcactgcaactcatgacgccgcaggcgacgccaaccatcgtcgccaacgggcagtttgataatttccgcgcggtgctcatcgcgcaagagacggcgggagcgctcgatcagcaggcgctggacgccctgcaggtcaatgccaccgaccgggttcacgcggtgacactcaatccagaggaaaacagatcatggcggtaaacgcacagtttatagcaggtaagtggcagcagggcgcaggcgcgccgttaaccaagctggcgccggaagaccagtccgttttatggcaggcgcaaagtgcgggcgcggcagatgtacaggccgcctgcgccgccgcgcgcgaggcgttttatggctggtcgcatcgtccattaagcgaacgcattgccgtggttcagcgtttcgctgcgctgctggaagagaataaagaggtgctggcgacgttaatctcccgtgaaaccagcaagccgctgtgggaaacccgtactgaagtacaggcgatgatcggcaaagccgggatttccattgatgcctacgccgaacgtaccggttatcgcgagtccgctatgccggacggcaaagcgctgctgcgccataagccgcacggcgtgatggcggtgtttggcccttacaacttcccggggcatctgccgaatggccatattatcccggcgctgatcgccggtaacaccgtggtatttaaaccgagcgaattgacgcccgcgaccgcggaactcaccgttcagctatggcagcaggccgggatcccggatggggtgctaaacctggtgcagggggcgaaagataccggccaggccctgctggaaaaccgcgatattgacggggtgctgtttaccggtagcgccgccgctggcttccatttccaccgctacctcggcggccagcctgagaaaatgttggcactggaaatgggcggcaataattcgctgatcgtggccgacgttgtcgatagcgttgcggcgctgaacgtgatcattcaatcggcctttatctccgccgggcagcgctgcacctgtgcgcgtcgtttactggtaccgcgcggtgagcagggcgatgcgctacttgaacaactgattgatgccagccggcagatccgcgccggtcggtgggatgccgagccgcagccgtttatgggtggggtgatttcgcaaatcgccgcgcagggtatgctgtccgcgcaggcgaatctggaaacgctgggcggcaaagtgctgctgcgcatgagtcagccggatccgcgctcaaccgtgctgacgccgggaattatcgacgtcaccgggatcgcggtaccggatgaagagtactttggcccgctgctgaccgtgattcgttatgaccagtttgatgaggcgatcgcgattgccaataacacccgctacggtctggcggtcgggcttatttccgccgacccggcgctgttcgacaagctggtcgacgaagcgcgcgccgggatcgtgaactggaacaaaccgctcaccggggcctccagtaaagcgcctttcggcggtgtcggcgcctccggtaaccatcgtgcctcggcgtggtatgccgccgattattgcgcctggccgatggcttctctggtcagcgaaacgctgacgcttccggcgacgacgtcgccaggtctgccattctgataaccgtttttgtgaggacactatgtctggatttgaagcgaattttgacggcctggtggggcctacgcaccactacgccgggttgtcggtaggcaacgaagcgtcacaaaacaaccgcgacggtttatctaacccgaagaaggcggcgctgcagggactttataagatgaagaccctggcagatcgtggctttgtacagggtattctgccaccgcagccgcggccaaatatgacgatgctgcgcagtattggttttcagggcagcgacgagctggtgatccagcgtgcggctaaagaggccccgcagctattgtcggcctttagctccgcttcctcgatgtggaccgccaacgccgccaccgtgtcgccgtcggcggatagtgctgatggaaaagtgcactttacggtcgcgaacctcaacaataagctgcaccgcatgcaggaagcaccgatcacctcggccatcctcagggcgaccttcgccgatgaacgctacttcgcgcatcacgcggcgctgccgcagcatggcgatttaggtgatgaaggagcggcgaaccataaccgtttctgtggggattatgatcgccagggcgtacagttttttgtctacggtaagcgagccagcggcggcattgcgccagctaaataccccgcacgccagacactggaggctagcgaagcagtggcgcgtctgcatcagctcgacccgcagtacaccgtattcgctcagcaaaatccgcaggctatcgaccatggcgtattccacaatgatgttatcgccgtcagcaaccgccacgtgctgttccatcatcagcacgccttcctgcagcagcgggaggtgctggcgacgctgaaggagatcaacgccaggctgaatattccattcaccagtgttgaagtccctgacgagcaggttagcctcgatgacgcggtggcctcttatctgttcaacagccagttactgagcaaagccgatggcaaaatgttgatcgtggtgccggaagagtgccgtcagcgtgaaaacgtctggcgttatctctccgctcttgccgccgatagcgcatcgcctatcgatgaagtggcggcattcgatctacgtgaaagcatgcgcaacggcggcggcccggcctgtttacgtctgcgggtggtgcttaacgatgccgagcgcgcggcggtcaacgctcacagcctgatgaatgacgaacgctaccggcagctgaccgcgtgggttgaaaagcattatcgcgaccgcctgcatgccagcgacctcgccgacccgcagctgctgcgcgaggtttatcaggcactggatgagctgacgcagattttacatctgggcgcgatttatgactttcagcgataaggggccgggaatggaacaaaacgtcaacgatttactgcattgtaaactgcagacatggacctttccgccgactatcgaagccagttggttaggcgatggcattctgcaactgctgccaaaaacgtcgtggcgacaggcgacgattctttctgccggggtgcacggtaacgaaaccgcgccgattgaaatgttgctgcagatcctgcaggggttaagcctgggcgaacagccgctgacccatgcgctattggtggtgttcggcaatctgcccgccattcgcgccggccgtcgctacctgcataacgatctcaaccggctgtttggcggccgccatctggcggcgatgcccggtaacgagtcgcgtcgcgcttttgaactggagatggccgtgcaggccttcttccgtagcaccgatgcccacggcaaggtgccgcgcacgcatctcgatctgcataccgctattcgtgggtcaaaatatcggcagtttgcgctgctccccgctcatgatggcgactacagcgcagacttttatcagctgttgcaggccagcggtatggacgccatcgtgcgccataccgaaccgggcggcacctttacccacttcaccagcgagaagttcggcgcacaaagcgccacgctggaactggggaaagtgatgccattcggtgaaaatgatttgcgcttgtttgccgccaccgaactggcgatcggcgcgctgatcgctgacggcatcatgccgccgcgtagcaaagcgccggtcgaatactttgtggtgcagcagagcatcatcaagagcgagaacggttttacccttaatctcgacccgaaaattgaaaactttaccgcgctgccggcaggctatgaaatcgcccgtcaggcgcagaaaacctgggtggtcaatgccgacgccccctacatcctgtttccgaatgcgggcgtcgccgccggtcaacgcgccgggctgctgctgaccgctgccgcgccaagcctttccatgcctgcttgaaggaatcaacatgactgaacatcaacgtgaggggcaggttcatcctgccgccgacggggagtgcccgtcgcagctcaaacgcggccttggcgcccggcacattcagatgattgcgctgggcggcgctatcggcaccggactgtttatgggggcgggcagaaacatcgccgtcgccggaacgtccattctgcttatctatctactggtaggtttctttacctatatggtgatgcgggcgatgggggagctgttgctgacccgcctggattaccgttcgtttgcggatttcgttggcgactatcttggcccgcaggccagtttctatctgggctggacttactggcttagctgggtggtgacctgtatcgccgacgtggtggtttgcggtagctatatgcagtactggttcccggagatgtcggcgtggatgcccgcactgagcacgctcgggatcctgttcttatttaatttgctgtcggtaaaaatgttcggcgaagccgaattctggtttgcgctgattaaggtcatcaccattatcgcgctgattttgaccggcgcgtggatgattgctatcggctggacttcgccggatggcgtgaaggcttcgttaggccatatcaccgacccgacggcctttatgccgcacggagtgaccggtttcttcgccggtttccagatagcgatcttctccttcaccggtattgagctgctcggcaccatgacggcggaaacgcgcgatcctgagcgcatcctgccgaaggcgattaacgcgctgccgctgcgcatcattattttctatctgctgtcgatggtggtgattattgccgtggcctcgtggccgggcgtctcgccggatgccagtccgttcgtgaccctgttcgccaaggctgggctgcctgccgccgcggcggtgataaactttgtcgccttgacgtcggctatgtcgtcggcgaacagcggcgtttattccagtacccgcatgctgtacggcctgtcggtggaaaaacatgcgcactggcagttccgtatactatcgcgtaatacccgcattccggtacgtagcctgctgttctcctgcttctgcatgctaagcggtacgttactactgttcctggtgccaaacgtgatgacgttgttcaccatcgtttcaacgctggcggcgatcatggtggttttcagctggggtatgatcctcgtggcgtacctggtgtatcgccataaacgcccggacctgcacgcgcggtcgaaattcaaaatgccggcgggagtggtgatgtgctggctgagcctgctatttttcgccttctcaatcttcattatgattttcgacccggatacgctgctggcgctgatggcctcgccgctgtggtttattgcgctatggtgcttctggaaagtgaaacaaaagcgcgaagggcaactggcattggataacgccagcgcctgatgatacccggcagctgaagcgtggctgccggattttccttttcgccgtagcgcggtttatgatgtcgcccgacacttcattgttggatcaggacagaagaaggaaagggtatgacagagcatttcccggcgctttcacacgacacgttagcggcggccaatctcatcggcgactggttggcgcaggatgatttgccgcagaatgcgcagccgcagattgcggtgttggccggtaacgcggtgatcccgacgattgacgccgcctgtcggctcacggcacagaggcagattccactattgataagcggcggtattggtcattcgacgacctttctttacgacgccgtacaaaagcatccgcactatcaggcgctgcaggtagaggggcgtccggaatcgcatatcctggcggacatcgccgaacaattctggcaaattccgcgcgatcgcatcgtggtggaggactgttcaaccaactgcggcgaaaacgcgtggtttacccgccggttactggaagagcgtgggctggatcatacctctggcgtcgtcgttcaggatccgacgatgcagcgtcggacgatggcgacgtttgcccgcgtctggcaggaggcaccggcgcagccgcagtggtggagctatcccggttgttcgccgcggcttgaaaacagcgctgctggcctgagattcagcggagacgatagtggattatggccggtggggcgttatctggcgctgctgcttggcgagctgccgcgtctgctggataacgcgcagggttatggccccaacggtaaagggtttattacccacgtcgatttcccacgcgatgttagcgcggcgtggcaatgcttgcgtgaagatacgctattgagcgaggcgctgaacgccagaacgctggggtagggagaaaggcggatagccgcagctatccgctggttctgagtttacttcgcgaatttatccagtacgcggacaagctgggtaacaaagccgtactcgttatcgtaccaggccacggttttcacgagctgtacgccgccggcttccatgatctccagttgagtcgcatcatagattgagccgaaatggctgccaataatgtcggaggagacaatttcctcttcggtgtagccaaaagattcattgttcgccgccgcatttttcatggcctgattaacctcttcagcggtgactttcttcgccaatacggaaaccagttccgtcactgagccggttttagtcggcacgcgctgggcgtgacctttgagttttccgctaagttccggaatcaccagaccaatggcttttgccgcgccggtggtgtgcggaataatgttttccgctgccgctcgcgaggcgcgcaggtctttgccacgcggcccgtccaccagcgattgcgtaccggtataagcgtgaatagtggtcatggtgcccacggtaatgccgaaagcatcgttgagcactttagccattggcgccagacagttggtggtgcaggatgcaaccgaaatgatggtgtcatccgggctcatggtgtcgtcgttgacgtgataaacgatggttttcatctcgccagcaggggcggaaatcagcactttcttcgcgccggcggtcaggtgtgcctgcgatttttccgccgacgtatagaaaccggtacattcaacaatcacctcagcgcctgcggctttccacggaatatgctgagcctctttttccgcataaacggtgatttttttaccattaacgatcagcgcatcttctgtaaaatcaacgctccatgggaaaggaccgtagttagagtcatgtttaagcaggtaggctaagactttcggtgaggtgagatcgttgatggccacgacctccagcgggctatttacttctaacaggcggcgaagtactaaacgtcctatacgaccaaatccattaatcccaagtttgctcatggatattctcctggtggtgaagttgatacgttaaaacttcttcaggcagagcggggagagtaaactatttactttcagcggcttagcagttcacctgcggtgtttctattgctaagttacctgcctgaagcgtcttcagtaactgtcacgtggagccagatggtgcgaaggaagtataacgccgggtcggaggtggttccaatgttcttaccgcgacagcacaacaaaaagagtgcctaccattgttcgctatttcatgcggcgttgagtggtaaatatgatctacatcacaataacagaaattagaaaaagcgcagaaggatatagctacattgaggttgtattgataactatagcggtggttcagcacaatattgataatgagaatgaatatcattcattgacatctggtcatattaatgtaaccttgcattaggaataatacagggatgaatagaaaatggattgtggcctgaggaataattatcaacccataacttaaaagtcatgccgaaattccattctgttgacatgaaatgcgggaagggaaatctgcagggtaaatcataatgcgggtgtttaaagatattatccttgccgggagcattctcttttctgtcttatattctgttttctcgttgtgcgatgttttgttgatgatgcagatattttattggcacccagagcactgctgtctgtgtttgccattggatgtatatattttctgagcaatgattatttttggctattgaattacataaggaatatgaaagatgaaagagctgacaaataaacagttgggtatggtctctggtgcaggggggatattgggcgggaaattgctcagggaatcggcgctggagctggcacatttgtaggcggaactcctggtgccataaccggtgggatcgcagggggacaggtttatgactgggctgcaacaaaaacaccggacccagcgatgtccccatccggtctgggcggaacgctcaaacaaaaaccagctaaccttccatccgaagcgtggaatgcagcggcaggcagagaatgttactggagtccgaataacctcaacgatatttgttactgacagaagctgattgacgtacgggtataaaccagtctaaaagccaataagtagagcagtcagcgtatggaagagcatgttatcagctcttccatctctaaacctttaaaactagccataattaaagtttgtcagtccagtgggagtcatccacgccttttggcgccgatggaataaaaaatgaacgttgacggatataaccgcgaatacaatattgcaagaaacaaagccgtaaccggctgttttgccatgtttgcgctattttttggcatcacatgtttgccgctttttttcgagggcagcaaagaccttatgataacgggatatctctatccactacttttcggactggagttcctgacaattgtcccctttattatctctatttctacaaacgcgagggcatggggagaggagattttcgtttcggcatttttattatacttttcctgtgtattctgttgatccaatttctgttgccttttgtcactgcaggctatcagactgaaaactggtcagcttcacagatgcggctggatgagcatgtattctggctaaatgccattgtgatgattctattggttcctgtttatgaagagatggtcttccgcggctgccttttcagtgtgtttaaatactggctcgggaataacaattatgcggcggctgtcgctgtgtctattgtattttcagcctgtcatttacagtacatagactggcgatcgttcctgatattatttctggtttcactgatgctgattatcgggagaataaaagccggcggaatactgatgccaattattctgcatgcgctgatgaacgcggtcgtaattggtattcagtatgtgtcattcctccagtattccggaggggcttagccatagcgggaatgaaatatgtttcgtaaggaagcgctcgaaagcagggataaaacatggtgtggcaaagcagtattactaccgggactctcctctcggctggttataattaccagcgcgctttttttcgtctgcttcattgttttaattagcaccggcacttatacacgacgcattagcgtgcaaggtgaagttaccacctggccgagaccggttaatgtctattccggtgtccagggatttgtcgcgacacagttcgtccgggaaggggaccctgtaaaaaaaggtgatccagtttatcaaattgatgtcagtaaaagtacacgtagaggcgtggtcaatgagactcaacgacaggatatcgaaaaccaattgaagcgcatcgctgagattatcgctcgccttagagagagtaaggaaaccactttgcggatgcttgagcaacagaaattgcagtatagcgcctcttttgaacgctcggcaggcattgtcaggcgcgctgaggagggaataaaattaatgaaaaataatatggataattaccgacggtaccagcagcaggggttgattaataaagaccagttaaccagtctggtggccttgtactatcagcagcataatagtttgctaagcctcagcgctcagcatgaacaaaatgctctacagttaaccagtctggaaagtcaaattcagacgcaggcggcggaatttgacaaccgggtttatcagatggaactgcagcgttatgagctacagaaagagcggattaatactgatgcgggaggcgatattatcattcgtgcctcatcagacggcaaaattgattcattaagcgtcaccccaggccagatggtcaacgaaggcgacagtctgctgcagataattccagaaaaaatacaacgctattatttggttctttggatacccaatgaagccgttccatatatttcagtcggtgatagggtgaatatccgctacgaagcatttccggctgaaaaatttggtcagttctcggcaaaagtcacactcatttcccggacgccagcctcctaccgtgaaatgcagacctatacgaccgccccgattaactctacagcaggtacggctgcttactacaaagttgtgattagtcctgaaaagcaggctgtcagctacgccggcaagcgtctgcctctggaaaatggcatgaaggcacggagcacgttatttctggaaaaacgcaaaatctatcagtggatgctctcgccgttctacgatatgaagcgcagtgttacggggccgaatcatgaaccgtaaccaattcatatcatccatcgaggagaaattggatctgaaattccggcggcgagtcccggtcgttcatcagacagaaacgtcagaatgtggactggcctgtctggcgatgatatgcggacattatggtcgtaatatcgacctgatcgccctacgtcgccaaataaatctgtctgcccgtggagcctcgcttgccagtgttcagcaaaccgggattgagttagggatggaaagccgggcattgtcactggatctccatgaacttaatgctctcagaatgccctgtatcctgcactggaattttaatcatttcgtggtgctcgttagcgtacgtaagaatcgcttcgtgcttcatgatcctgccagggggcgaagaacagtcgggaccgaagaaatgtcacagtgcttcaccggagtggcgctggaggtctggcccggcagtacatttgtgcaggaaacgataaagagccgaatcggaagacgggcgttaatcagcagcgtgcagggtatccggggcgtactgagcaaaattttctgtctttcgctgattattgaagctatcggcctggtgatgcctgtcggtacccaattggtgatggatcatgctattcctgcgaatgaccggggattgctcatgcttatctgtggagtcctgatgttttttattttggggcgtactttggttagcgtgatccgcgcatggtcatcccttgcgatggagtcattgataaatgtgcaatggcagtcggggctattccgtcatctgcttcagttgccgttgacctattttgagcgacgaaagatgggcgatattcactcccgcttcagctcgttggatgcgcttcgcgccacgtttacaaccagtgtggtgggggcaatgatggacagcatcatggttgccggtctcttgttgatgcttatcctgtacggtggaaaattgacggtttttgtactgggctttacagcggtatatgtcttcattcgtatactgacctatagccggtaccgccagctgtcggaagaagcgttaatcgccggagcccgcgctggttcatattttatggaaacactctacggaatagctacggttaaaatgcagggaatggcagaacggcgtgggagccactggctgaacctgaagattgatgccatcaataccggtatcagactcagccgtcttgatatgttcttcggcggcattaacacgtttgtggcgacgtgcgatcaggtgactattctgtggctgggcatcagtctggttatggaaaaccaaatgaccatcggcatgtttgtggcatttggcgcattccgcgcgcagttttctgaccgggtaggatcgctggtcaacttcttattacagctacgtatgatgagcctgcacaacgaaaggatttcggatattgctttgaatgaaaaggaagaaagaaaaccggattcaggattaaaggcaaccatgtctccggccagtttggagattaaagcgctaagcttccgttacgacagccggtcagcacccgtctttagcggccttagtttcaggatccgagccggcgagagtgtggccattaccgggccctccggttcggggaaaaccacgctgctcaaagtactgtgcggcttatctgaaccgatatcagggactgtcttaatgaatggtacggatatcaggcaactggggataaataactatcatcgattgatcgcctgcgtaatgcaggatgaccggctgttttctggctcaattcgggagaatatctgcggattcgctgaaaatattgatgatgcctggatgagagaatgtgcccggacaagcagtattcatgacgtgatattggctctgccaatggggtatgagactttaatcggagaactgggggaggggctatctgggggcagaaacaaaggatttttattgcccgggcgctttatcgccgtccggatatattattcatggatgaagccaccagcgcacttgacgcagagtgtgaaaaagacgtcagtctggcaatgaaaaagttgaatataacccgaataattattgctcaccgtgaaacgaccctgcaaaccgcggacaggatcatcaccctcggcgaatccgattaacagccaacatcctactctactgcgggcatttggttcgcgatgcggttgaataatgaacacaaagcaggatggcaggagtggcggggcctgcagtgagttatccacaaactatgcgatctgatactgacccgtttggtggataacttaaaatgtttcgggatacttaattcactctgcgttataagtttgcgccatacatcacgataatcaatgtcttcactcggtaccctaatataagaatacttaaacaaggggaatagcataccaatgaaaaagagcattgcactgacgatggtggcgctggcgtgtttggcggccaacgtccaggcagctgagaaacttgctggtaatgaaatacttgcggtacagaaaggcggggtgccagataaagtctatacccagcatcagccgaaattacgcatagctacctataatatcggcaagaatgaagcttctgataatgtggccgattttacggcacttaattcagcgattaaaaaaattaacgccgatattattgccgttccggaagtcgataacaaaacccagcgtagccagaaaatcgatcagcttaagacgattgccgatgccaacaatatgcattatgcctttggcaaagcgttagatttcgacggaggcgaatacggactgggtctgctgtcaaaatacaaaatcctgcattctcaggtggtgaagctgccatcaggcaatgcggaacagcgcgtggcgctactggcgcaggttgatgtgccaggttttgattccgcgccgattattatggtgacccatctcgactggcaaaaagatcccaccatgcgtacagagcaggctcgctatcttctcgatttgagtattggtgatgcggcgtctgattttaaagatatcgcctcttcaattaagatcctggctggcgatttcaattcaacccgtgaagaacagccggtgaaagagatcggttatttctttaacgaagtgtcgaagcaggggacggatacgcgtagctggcctgccgttaacccggctattgatatcgaccatattttcaccttcaaagggcaaaagtgggatgtgaagaagctggagattccgcataactcgccggaatttaactggtcagcggccagtgaccatctgccggtcattgctgaactgcaactcaccgagcagtaacattgcccagggctctttgcaaaagagccctgatgctattcaattcgcgctaacgcttttttttaagcctcggtaaaggttaatgaaaatttaagggaaggcggttatgttaacaacatcacacttccattaaggtttattcatgcgcgataaatattctggcctgcagataggaattcactggctggtctttttactggttgtcgtcgcctacgcggcgatggaactgcgcggtttcttcccgcgcagcgaccgtccggtgataaacatgatccatgtctcctgcggcatttccatttttgtcctgatgattgcacgactgctggtgcgcctgaagtctccggcgccgccgattgttcctaaaccctcgccgatgatgaccggtttcgcccatcttggccatctggtgatatatctgctgtttatcgcgctgccggcgattggcatggtaatgatgtactaccgcggtaacccgtggtttgctttcggcctgacgatgccctttgcggcgcaaagcaacttcgctttggtcgacagccttaaggggctgcacggcttacttgccaatatcggctatttcgtgattggcctgcacgcgctggcggcgctgctgcatcactatttatggaaagataatacgctgctgcgcatgatgccgcgcaagcgttgagtactacgcctgacatgcctgaacccgccaaccggcgggttttttgtttccgttaactcgctgataaatgattcacgaaatgttacttatgctgcaaatttgtatcgagtatgtaaataaaaatgtctaatcgaaacgaaaggttctataagaatctcagtgcggtggattgaatccagccgggaggtcgtcgaaacgacacccaggcacgttcagcggtatccgcagcgtcattggctaaaacgcctgcattttcaataccaatgagcaaaaggaaaacctgacatgaccgataatataccggccacttcccctcctgtcgccgatgtggggggcgctgaacgcctgagcccgcgcgagcaggtggtgatcaataaattgttccgtcgcttaatcccttttctgtttctgctttttatcttttcgtttcttgaccgtatcaatattggctttgccgggctaaccatgagccaggatttggggctgagtagcaccatgttcggcctcgcgacgacgttgttctacgcgatgtatgtcatcttcggtattcccagtaacatcatgctggggatcgttggcgcccgccgctggatcgccagcattatggtggtttgggggattgcatcgacagcgaccatgttcgcgaccgggccaaacagcctgtatctgctgcgcatgctggtggggattgccgaagctggctttcttccagggcttctactctatttaacctactggtttccggcctactaccgggcgcgcgccaatgcgctgtttatgattgctatgccggtgacgatggcgctgggttcgctggtctccggctatattctcagtatggatggcatgttggcgcttaaaggctggcagtggttgttcctgctggaaggatttccatcggtgctgttgggggcggtagtctggttctatcttgacgacagtccgcaaaaggccaaatggctcaccgatgaggacaaacgttgccttggcgagatgatggagaaggacaaactacgactggtacaaccgaacggtagcgccagcctgagcgcgctgcagcaggggaaaggcagcctctggcgcgacgtcttcaccccggtggtgttgatgtatacgctggcctatttctttctctgtaatactttaagtgccctcagcgtctggacgccgctgatccttaaaagctttaaccagggcagcagcaatatcgccatcggtttgcttagcgccgtaccgcatatctgtaccattgtggcgatgatttggtggagtaaacgttctgaccgcttacaggaacgtaagctgcacacgttattgccctatctgtttgccgccgcgggctggatgctggcggcgcacggggcaaatagcgtgatgcaactgttgggggtaattatggcctcggcaggggcctatgcggcgatggtgattttctggaccacgccagatcagtccatcagcctgcgctcacgagcgatcggcattgcggtgattaacgcgacgggtaatatgggatcggccatgagtccgctgttattcggctggctgaaggatttaaccggcagctttaacaccggcttttacctcgtggccgggttcctggtattgggggcgctggtggtatcgcgcatcccgatgaaggccagccgtccacgagcgacgccataaaaataagataaaggagtggtgatgagagtgagactcgcagtacccgatgaagcccctgcgttgtggaatatccgtaatcaggcgattcgccatggctgtcgtcaaagctatggcgctgaagtgattcacgcctggacgccggaacagatgcccgaagggtatcgtcacgccgttgccgataatccgttttatatcgtggaaaataggctgggccaacccgtcgctaccggctatctcgatattgagtccataagcgtggaagcgatctttacgctgccggagtggggcgggcagggatgcgcggatttgatcatgagggcggttattgccgaagctcgccgacgggggctcgaaaccattacgcttgaggcgacccccaatgcggcgggcttttatctacgccatggctttgtttcacaaggcgaaaagagtcattattcgaaaatggccaacgccgagctacgctgtataaccatgagcctcactctcgattaacggtaaacctgcgccgctatgctatggttgttagcggcgtttcaatttgccactttagttaaataaatatagtataccccctatatgatatggagggcatctcgtgccacattcaccagaagacaagaagcgtgcgcttagccgcgtacgccgtattcgcgggcaggttgaagcgctggaacgcgcgctggagtccggcgaaccctgcatgactatcctgcaacagattgcctccattcgcggtgccgccaacggtttgatgggcgagctggtggagatgcatctgcaggatgaactggttagcggcgataccaccccggaccaacgcgcggcccgcatggcggaagtcggtcacctgctacgatcctatttaaaataaaatcacgacgaggaatggacagtatgaaatcacgtgcagcagttgcctttggccccggtcagccgttaaaaatcgtggagattgacgtcgcgccgccaaagaaaggcgaagtcctggtaaaaatcacccacaccggcgtttgccacaccgatgcttttactctctctggcgacgatccggaaggcgtgttcccggcggtgttgggccatgaaggcggcggtatcgtcgttgaagtcggcgagggcgtgaccagcctgaaaccaggcgatcacgttattccgctgtataccgccgagtgcggcgaatgcaaattctgcaagtctggcaaaactaacctctgccaggcggtccgtgcgacgcaggggaaaggtctgatgccggatggcaccacgcgattctcctataacggcgagccgatatatcactatatgggcaccagcaccttcagcgaatacaccgtctgcgctgaaatttctctggctaaagttaacccgcaggcgccgctggaaaaagtatgtctgttgggctgtggcgtgaccaccggtatcggcgcggtacataacacggcgaaggtaaaagagggcgacagcgtagcagtattcgggttgggcggtattggcctggcggtgattcagggggcggtacaggcgaaggccggacgcattctggcggtcgacactaatccggataaattcaccctcgccagggagatgggcgctaccgactttatcaatccgaatgactacgacaaaccgattcaggacgtgattgtcgagctaaccgacggcggcgttgatttcagttttgaatgtatcggtaacgtcaacgtcatgcgtgcggcgctggagtgctgccataaaggttggggtgagagcgtcatcatcggtgtggcgggcgccggacaggaaattaaaacccgaccgttccagttggtcaccggccgggtatggcgtggttccgccttcggcggggtgaaagggcgtagccagctaccgggaatggttgaagacgcgatggcgggtaagattcgcctcgatccgtttatcacccaccggttgccgctcgaccagatcaatgaagcattcgatctgatgcatgaaggtaaatcgattcgtaccgtgattcacttcggtgataactaagttttgctgatagcgaaacccgggctatttagagcccgggttgacttcaggttatgttaatacttgcgccagcgttcatcgccggattgccatcgtttctgctcccgccgttctctctcacgctgaatatcggacttttgatcttcccagattggacaatccgggccgtttgccacttcgcagggtaccgagatatcgtttaacggattgacctttttctcttcccacaacgttgggtcgcgtaaatccacttctggcgctttcagcgcctgggccgaggctgtcgctatcagtaaaaaagcgccaaacatcaggcggcgggaggctcctttcatctttatccttatgatgttttattgataaccattcgcaataataacatagcgtaataaaacattaacagcaggattcagggcgaattttacagttcaaatggcgggatcatgctcagcatgaattcccctggctcggtggaaaatgcttcgacggttacgccgtctttatcggttatacccttaaacactttgccgtctggcgtagtgatttgataagggaaatagggcataggcttgccggtgtcaggatccttcagcacatagtcatggcgataaagtcgcttaggttcgtcgtggatacagccctgtagtagcaaggcaaaaatcatcgcacttgcgcccttcattatagacatgagttccttcttcttgattgtcctcgggataaaatctgctatccatagtaacaaatgcaggtgatctgacatctaaatgaaatctgaaacaggaaaagtaaaaggccccgtggtgaacggggcctgtgttttactgcttatccgctaaagcgtaagcgatgatgtaatcaccgcgatccggagactgacgcgcgccaccggcgttgataatgatgtactgcttaccggttttcggtgaaacgtaggtcatcgggccggattggctccccaccggcaggcgagatttccaaatctcttcgccgttggcggtatcaaaggcgcgcagatagaaatcctgggtgccagcgaagaacagcagaccagactgggtagacagcgaagccccagagtcggcataccgatagggatcggcatatgcatgcggatacccaacggaccggtatcttctaccgtacccaccggaacctgccagaccagcttaccgcttttcagatcgaccgccgacatggtgccgaacggcggcttctggcaggggatacccaacggcgacaggaaacgctcacgcattgcgccatacggcgtaccttccatcggtacgatacccatttcaataccgctggcatctttggctactttcgctcgcggtaccatgtagttagccagtccaagacgcatgtcattgacgaacatcaggccgttattcggatcaaccgacacgctaccccagttcatcccgccaagcgagcccggatattgcaaggagcggtcctcacccggtggagtaaagaccccctgatggcgcatctctttgaactgaatacggcacagcagcaggtcaaccggggtggcaccccacatatccgattctttcaacgtttcgttgccgatcatcggcatgccgacggagtaaggttgcgtcggcgagtagcgttcacctttgacgttaccagccgggacaggacgttcttccactttcgccaccggttcgcccgtcgcgcggttaagcatgaagatcatgccctgcttgctggtttgcaccagtaccggcgtcgtaccgcctttaccgtccggcaaatcgtacagcaacggttgcgaaggcaggtcgaaatcccatagatcgtgatgggtggtctggaaatgccagcgcactttaccggtggtcgcatcaaccgcaacgattgatgagctgtatttatcatccagcgccgtacgttcgccgccgaagaaatccggggtggcgttaccggttggcagataaatgagatttagtttggcatcgtaagacatcgcggaccagacgttcggcgtgccgcgagtgtaggtttgtccttccggcggtacgccggtcagctgcggattacccggatcccaggcccaggccagtttaccggtatgcacgtcaaaagcgcgaactacacccggcggttcaccggtggagtagttatccgcgattcgaccaccaacgacaacaaggttaccggcaaccagcggggtagaggtctgctgataataaccaggtttgatttccccatgccgacgctgagatcgacggtaccgtgttcaccaaatgcttcacaggctttaccggtatcggcatcaattgcgatcagacgcgcatcggtagtcggcaggaacaggcggcgggcgcaggcggcaggctgagtcccggcaacggcatttgcctgagcctggctatcttcgtagtagcctaaaccgcggcaacgttgccagttcggcgccgtcgcttttgagtcatagcgccatttttctttgccgctatcgacatccagcgccagaactttgctatatggcgtacaaacatacagagtatcgccaatctgtagcggcgtattctggtcttccgcgccggaaccgttactctgcggaatatcgccggtatgggcaatccaggcaacctgtagctggttgatattatttttattgatctgatccaacgcggcgaaacggtcgccgtgagtggtattaccccagtgctcccagtttttttgttcttcacctggctgtaccggttttaccggcacgggttcgctggcgctgaccaacggctgggatttaaacatccaaccaaaactgaccagcagtaccacggccagcacgcccgccagggtgaaggccgcgcctttttttgccggtgcgctggaaaggaaaggccaaacaatggcgcacagaaaagccagaacgccaagcgcaaacaggcgtgagaacagcggccagtaggtccagccagcgtcgctgatagcccaaacaatggaagccacgaaggcgacggcataaagaacgataccgccgcgacgattgcggaaaataagcagggaggcgataaccatcaccagtcccataatggcgaaataccaggtgccaccgacgcttgccagtttggcgcctaaaatgccgattgccagaccgatgattaacatcagtccggcgagtagccactgcaggatccgggggaatccgcgcggcacgttgcccgtagccatgttgtctccttataccaccccttgccaggcgtgtaccaaatgaatcaattgcaaatagaaattgcttttgagtgaagctaactaaagcttcataaaggtgatttcataagatgaattcatttcacatgaaccaaatggtgaaatcatggctatgataaatctgttaatgaaatgagcgcaaatgttaatgaatgatttcgcactaattgattatcgcgacgtatatattaagggcagaagaatgaacgtagcggtgccgttaccccaatgtgctgattcggggtaacggccattgagagtcaggcaggcatggatttgcgtatcgcgctcagtagagtttgcgccccctgcgacaagctggcgtccacccgggtaagaataccgatcggctcgccggcgccttcggtggcgataggtaatgaggttaacaaaccgcgacgcaggtcgtctttcaccgcgccggaagggacgaaccagacatagtcataatcgacggtgagctggcgtgaaagcgaggccgacagcgtttcaatacagccggggggaattttacaaccctggctttgtagtagcgtttctgcattctgccgtggaattgtccctttcggtgagacgaccaccggccactccatcacccggctgagcgttactgtctcctgcagcagcggatggccggggcggacgaccagctttagcgattccagaaacagcagttcatagttgaggccgctcatcagttccggatctgacatgcgtccaataccaatatcgacatcgccggatttcagccccgccagcagcatggtgttattcatggtggcgacctgtaaggtgatgtctttttgctgtttatgaaattgaccaatgaccgtaggtaaaatgccaagcgctgcggttggcagggcgccaatccgtaccacatcgctattcataccttctttacgattgagagcctgtcctgcggtattgagggcatccagcaccttgaccgcgtgggtaagaaactgttcgccaaccagcgtcaactgcgcgccaagccgcccgcgctcaaagagacgggtaccggtcaactgctccagctcgttgagcgtttttgatagcgcaggttggctaagattcagggtttctgccgcccgcccagggttccctgctgtgcgacggcgacgaaagtatgtaaatggcgcaagcgaatgcgctgactgaagagaccatttttttccataatcgatgttaaaaacagagctgtctcggtagcaagcgaagttgtttaattttgataactagttagcaaaatattattaacatttgatcttattgtcttacaagtcatttctgtcaggcgcgataaaaagccccgcactcggcggggcaggaaaaaagggggtgttttggtgggaaattaaatatcgaagaacacggtctctttatcgctctgtaaataaatatcaaagcggtagacgacttcatctccacgcacttcacgttgcgcgataagcgtctggcggcgaacttcccattcaatcagattcaataccggatcctgttcatttgccgcctgctcatcagcaaaatacatccgcgtattcaggccgatgttgataccccgcgccaccacccacagattgatgtgcggcgccataatgcgtccgtcacggccgacgaccgcgccgggtttgatggtttgaaaacgccagacgccggatgcaaagtcagaacacgtccgcccccagccgcggaagttcggatccagagccttactctgctgacggtcgtcgggatggttataacgcccgtcggcgttagcctgccagagttccagcagcacgtcgcgtaccggcgttccggaaccatcgaaaacgcggccttcaatcgtaatacgttggcctttggtttccgcgctcactaagttggggccgaagtttttctcaaaaatatgaaacccggcagcgtccggcgccagaccaatatgcacatagggcccggcagtctgcgaggcggtttcagctaaatagtctttcattgggcggcccctgagtacgattttcgaacaacgtggcgcggtggccgcgcagcacaaggtcaaaacgataggccaggctgtcgagcggcacggcggcgtgggtatccagctcggcaatcagggtacgtacggcatcatcgttattgagggttctgacaatcggacactgtttaataagcggatcgccttcaaagtacatttgggtaatcagacgctgcgcccaggcatcgccggagagcgaaaagtgaatatgcgccggtcgccagtcgctaacctgattacgccacggatagggccgggtttgatcgtgcgaaaacagtaataaccgttttcatcggtcagtacccgtccgcagccgccgaagttggggtcaatcggcgccagatattggtctttcttatgacggtagcggccgccggcattggcctgccacacttcgaccagcgtatttttcattggtcggccaaagccgtcgcgcacgtatccgtgaacaataattcgttcgccaatcggcaggccgtctttggcgtagttgaggatgagatcgttatcgagcggaccaaggtcgtcgctgctgaataccgggccggtaatttcagaaagtgaattttgcagggagatgagggcattgcgcggcgagcgcagcacactggtcttatatcccggcgccagcgccggcggatggctattgtaatcgcgatgtacgacctcgcgcggtgaccatttattgttcatagggtactccatcaatcggaagagaggcatgttgttgtaatttcgccagaaacagtctctgtaaatgttttgttaatttaaagtgaaattaaatctaatttttcataactcaaggttatgtttttatgacggcgaaacgcggtagcaggttatccgcatcacagtttgtaaattcttcccgccactcttaacgcgctttcctacactccaggaagtattcactggaggtaagacatcatggcgaacaccatcacggctgatgagattcgggaaaacttttcacaggctatgtcggcaatgtaccagcaggaagttccgcaatatggaaccctcctggagttggtggcggatgtgaatttagcggtcctggaacataacccgaaattacatgaacaattggctaatgccgacgaactggcacggctgaacgttgagcgccacggcgcgatccgcgtgggaacagcggaagaactggcgaccctgcgtcgcatgtttgccattatggggatgtatcccgttagctattacgatctgtcgcaggctggggtacccgtgcattctaccgcctttcgccccgtcgatgacgcggcgctggcgcgtaacccgtttcgtattttcacctcgttgctgcgccttgaactgatcggcaacgaggcgctgcgccagcgagcggcggatattctcgcgcgtcgcgatatttttacgccgcgctgccgtgaactcattgcgttgcacgaagagcaagggaattcaccgctggcgaagcgcgtgaattcgtcaacgaagcattggaaactttccgttggcaccgtcatgccaccgttgacgagcaaacctatcacgcgctgcataatgagcaccggttgattgccgacgtggtctgtttccccggttgccacattaaccatctgacgccgcgcactctcgatatcgatcgggttcaggcgctaatgccgcaatgcggtatcgaaccgaaagcgcttattgaggggccgccgcgccgcgaggtgccgattttactccgccaaaccagttttaaagcgctggaagaaccggtgatgttcgctggtgaacataaaggcactcacagcgcgcgctttggcgaaattgaacaacgtggcatcgcgttgacgccgaaaggccgagcgctgtacgaccgcttactaaatgaagccggggtcggtaaagataaccttaaccaccagcgccatttgcaggaggtctttagccagtttcctgacagcgaatttctgttgcgtcagcaggggttggcgtggttccgctatcgcctgaccccggcggggaagcgcatcgccatgcctttggccccggagacgatccgcaaccgttgatcgaacgtggctgggtagtcgcgcagccgatcgtatatgaagattttttaccggtgagtgcggcggggatcttccaatcgaatctgggcaacgaaacgcaggcccgcagccacggtaacgccagccgtgatgcttttgaagcggcattaggccgcgaggtcctcgatgagttcgagttatatcaacaggcggaggagcggagtaaacgccgttgcggtctgctctaaaatcggtactctgcatggcataacttgcaaaaggacgttgttatgcagaattcatctacgccgctggtaaaaacgcggcagggcacattatccggcatcagtgaacaggggatccatatctggcgcggtattccttacgcgcagccgccggttggcgagctgcgttggcgttcgccgcagcctccagagcgctggcagggcgtgcgtcaggccgataccttttccgccgccagctggcaggatatcgaatattgtcgtgaactgggcggcggcgatcctggccgtttttccgaagactgtctctatctcaatgtgtgggcgcccgccgcccgctcgcagccgcttccagtgatggtctggctgcacggcggcggctacaccatcggcgccggcagccttccgccttacgacggtagcgcgttggccagccgcgatgtggtggtggtcaccgtgaactatcgtcttggacacctcggttttttcgctcatccagcgttggaaggcgaagagggcgagcggttgtataattttgcactgctcgatcagatagccgcgctgcgctgggtccaggataatatccacgccttcggcggtgatgccgccaatgtcaccttgttcggcgaatccgcggggcgcgtagcgtcctgtcgttaatggcgtcgccgaaagcgaagggattgttccataaagcgatcgtgcaaagcggttataccttaccggatttaccacgggaaaaggcgctggcgaagggaaagcttctggcggaacatttttctcttgccgatgccagtgcggaacagctgcgggcaatccccgctgatgccttttgggcgctgactgcgccgctgaatatcggcccggcgccgattgtcggcgatgcggtgctgccggagcccatgctcgacacgttctttaagggccgtcagcatgcgatgccggtgatgattggctccaatagcgatgaggccagcgtgatggcggtatttggcgtcgatattgccggtcagattcaaaaactgcgtcgcgagcgccgttttggccttgggctgatcaaactgctgtatccaggcgtcaaaggtgatgaagcgttaggcagagaagtgtgccgcgatatggcgttcaccaccctgggttacgtggtgatgcaagcgcagcagcgtcttgggcaaccctgctggcgctactggtttgattacgttgcggaagcggaacatgaaacctatctccatggcgcctggcacggcaacgaagtggtttacgtttttgacaacctgacccgcgccgagccggtatgtcagtacgccagtgaggcggatcaagccttcgccgcgcaggtcgccgactactgggctaattttgctcgccaggcgggcaatcagtgcagcgagttaaccggcccggtgcgctggcctgcctgccagcgcggacgggaccgtttattgcgtatcggcctcaacaagcgcgcgggctttaaagttgagaaccgctttatgcgcgcgcggctggcgctattccgccgggtgatgaagcatcatgtgacgctggattaaccagcgcggcgcgaaagcgcgccagcccgtcggccttgctttgcgaacggcgaacgatcagccggtagctggcgccggttttgacgctgagcgagaaggggcgacatagtcgcccggtacgcagatccccggcaaccagtgtttcgtccgccatggccacgccgagcccctgcatcgcggcggtaatcgccagatccatggtgtcgaaatattggtttttatgcatttttagcgcaggttcatgcggaaagtgcgccagccacagcagccagtcggttttatcgcgcgtcggatggagaaatgtggtgcctgatagctggggatcgcacggcttatcggggctggctaccggcgtcagtgcctcttcaaacagcaagtcgccggcgctctgatggggccgaagataatcgccgcatcgtagggctcagtcttaaagttgacgttatgctcggtggtggtcgtcaacgccacctgcagttccggataacgtcgttctatctccagcagtttcggcaccagccagcgaatcgcgcaggtaggcgctttcaggcgcacgacagtttgctgctggcgggcctgctcggctaccgttaacaggcggccaaatgccgactgtagctccggataaagcgcgctgccctgcggcgacagtcgcaggccccgggcgtggcgttcaaatagtgggaagccgaaccagttttccagcgcggcgatctgccggctgaccgctccctgcgtcaggcacagttcctgtgcggcatgggttaagttgagatgtctcgcggttatcagaaacgtttctacggtatgaaaaggcagggcgctacgcgacatgttggctccagctatgcattttgatcatgggcagtatgccacgcatcgttgcgaaattgggacgatgcgttccgtttttgccatctaatcgtcatccagtgcttacactattattagtctcgttgatacaacgtctctcaccgattagttgatgtgtataaaaggagccaccatgtctaaaccttacgttcgtctggataaaaatgatgcggcagtattactggttgaccaccagactggcctgctctcactggttcgtgatatcgagccggataaatttaagaacaacgtccttgctctcagcgatctggctaaatactttaaactaccgactattctgaccaccagttttgagaatggccctaatggtccgctggtgccggaactgaaagaacagttccctgacgcccttatatcgctcgtcccggcaatattaacgcctgggataatgaagatttcgttaacgcggtaaaagccaccggtaagaaacagctgattattgctggtgtcgtcactgaagtatgcgtggccttcccggcgctgtcggcgattgaagagggattcgacgtgtttgtggtgaccgatgcgtccggtacctttaacccgatcacccgtgatgcggcgtgggatcgtatgtcgcaagcgggcgtgcagttaatgtcgtggtttggcgtggcctgtgaactgcaccgcgactggcgtaatgatattgaaggattgggaaccctgttctccaaccacattccggattaccgtaacctgatgaccagctttaacctgctgagcaagaaataaacagctggcggccagttttcaggcctggccgccatttcaatcagacgggattattcacttatcgaggcgatatggtgcgcctttgcactttgatgtttcaatagccgcgacgccagtacgcccgatatcatcgaaccattcacattcagcgcggtacgcgccatatcgacaattggctcgatggcgataaaaatgccgaccagcgccaccgggaagttgagcgtagacaggacaatcaacgccgcaaatgtcccaccgccgccgacgcctgcgacgccaattgagcccagcgcgatagccggaagcaagctggctaaaaacgagaaggacagtgggtcgatacccagcgttggcgcaatcatggccaccatgatagccggatagatcccggcgcagccattttgccccatactggaaccaaaagaggcggcaatattagcgatggtattcggtacgccgaatttttcctgtgcggtaatggctaatggaatcgaagccgcgctgctgcgggaaacaaaagcgaaggtgagcaccggccacaccgttttaaagtagtgcagaggatgatgaccgctaacgatcagcagaatcgcatgcacgataaacatcatgacgaccgccagataacaggcggcaataaagccaagcaggctggtgaattgcgctagctgataggttgaaaagacttttgccatcaatgcgaggacgccgtatggcgtcagcgctatcacgatacgcaccatcttcataacccaaatttgaatcgcgttaatcccgctacttagtttttgaccttcctccggcgcctcttttttcaccttcaataacgcgactccggccagcagggtaaagattacgatgccgataaccgatacgctgcgcgcgccggtcaggtcgagaaaaatatttgtcgggatcagcgaagtgaccagttggggtagcgaaacggctgcggttttgctgacgtcttcggcggtcagcgtcgattgcatatggctaaaagcgctggcgtcaagaccgagtaaatcagcggtaaacagtccgacccagcctgccaccatcaccaggcacagcatgcaggcaacaatggttaaggacattcggccaataccggcgctattttcgagtttattaatcgctgacagaattgaaatgaaaatcagcggaaccgcgacaagtttcagtaaattaacatagccgttgccgacaatactgtaccaatcaatgaccgtttttcgcggttcgttggcaatgaaatggagtgataatccgagaagggcgccgagaaagatggcgaaaaaaacgctttttgataacgagtggcttttttgctcgagtttaaaaagtccccatgatgcgattaaaaataacgcgatatacgctggcgtaataaacataagatgtgcctcttgccccattcagcacctgaaatgccggaaagagatttatttcaaatttctctaaggctgtgaaaaaccttagaaccgctggggattataaagaattgaatagcataaggcatataaaaattgtggtttatgtcctgagtgttagtcctgtcatatttcagcaggagccctgggagctatgatcggaatgcatagctcttatgataacaattcgcttgtcgccttcaggcactttggtttgaatggatatgcaaataaaatgagaaaggattaatcatggctcttagtgcttcggtcaccactcgctcgaaattgccggatgtcggcaccacaatttttaccgttatcggtcagctctcagcgcagcataacgcgattaatctttctcagggcgcgcctaactttgcctgcgacccacagctggtggccggcgtgacgcaggcgatgaccgccggacataaccaatacgcgccgatgactggcctgcgagccttaaaggagcgtattgctgacaaaatcgccacgttgtacggcacgcaatatgatgtcgatagtgaagtgttggtcaccgccagcgccagccaggggatctattccgccattggcgggctggtacatgccggcgacgaagtgatttactttgagccatcgtttgatagctatgcgccaatcgtgcgtctgcaaggcgcgacgccggtggcgattaagctcaccgtgcccgatttcgctattaactgggatgaggtacgcgccgcgattacccctaagacgcggatgatcatcattaatacgccgcataatcctagcggccaggtattatcctccgacgaccttaatcaactggcgatgctgacccgccataccgatatcgttattttgtccgacgaagtctacgagcacgtggtgttcgacggccagaagcatcacggcatggcgacccatccgcagctggcggaacgcagcgtgattatctcttccttcggcaagacctaccatgtgaccggctggcgcgttggctactgcgtggcgccagcggcgctgatggatgagatctgcaaggtacatcagttcctcatgttttctgccgatacgccgatgcagtacgcttttgcagagcatatgcagaacccggcttcatggctgtcgctggccgctttttatcagcaaaagcgtgatttactccagcaactgctgcaagactcgccgttccgcttattgccgagcgccggctctttcttcatgctggcggactatcgccatttcagcgatgagcatgacagcgagatggttaagcggctgattaccgaatacggcgtcgccacgatcccgctatcggcattttataccgatggtactgataacaaactgattcggctctcttttgccaaagatgaagccacattgcgggctggcgcgcaggcgctgtgccgcgttaagccgcgttaaggagccagacgatgaaaataaaagccctaactcttgctttgggaatgctgtgtaccgtatccagttttgccgctagcgagttgcgctacggcgtggaagcggaatatccgccgttcgaaagccgcaacccggcaggagagctgcagggttttgatattgacctcggcaacgcgatttgtcaggccgcgcagttgaaatgcagctgggtcgaaacctcctttgatgcgctcattccgggactggtggcgaagaaatttgatgcgattaactcggcgatgaacattaccgagcaacgtcgcaagagtattgatttcacccagccgatctaccgtattccttcacagctggtgggcaaggccgacagcggtatgcaggcgacgccggaagggctgaagggcaaaaccatcggcgtgctacagggctcgattcaggagacctttgccaaagaacactgggaaaaacacggcgtcacggtagtttcctacaaagaccagaatatggcgtgggccgatctgcttaacggccgtatcgacgcctcgctggtgatgtccgcggccgggcaggccgggttcctcagtaagccgcagggtaaaggattcggttttatcggtaagccggtggctgatgatacgattctgggcagcggtattggctacggcttgcgcaagggcgatgaggcgactaaaaaacagctcgacgcggcaattgataaagtgcgtgccgacggcactatcacccgtctggcggcgaagtacttccccggtatcgacgtcagtgtgaaataatctttatttgcggctctttgctgcgcaaagagccgcccgcattacatcagcaccaccggtttgatgactttaccggaagctgaatctgcgaaagcctgattaatctcttcgagcggatagaactcgataagcttatcaatggggaattttccttgtttataaaactgtaccagctgtgggataaacaactgcggtacggcatcgccttcaattacacctatcaatgatttaccttccgccattagatcgttttggacattaaaggtgatatcgccggtaaagccgacgaccgccaccgtgcctaacggcttaatcgcgtggatcgcctgcagaacgatggcggcgacgccggtagtttcgatggcgtagtgcgctcctttgccggtcagttggcgaataaccgcaacgctatcttcctgtttgccattgatcacgtgggttgcgccgagttcacgtgccagctcaaggcggttcgcatgaatatcgacggcgatgatttggctacagccggtgagctttgcagccataatggcgcttaaaccaaccgcgccgcagccgaataccactaacgattccccggccaccggttttagtcgatttaacaccgtgccgctaccggtttgaattccgcaacccagcggaccaagaagcgatagttcgacttcacggtcgacaacaatagcattcgtcgctttggtgaccacatactgacaaaacgaagattggccgaagaagacggataattcttgatcatccagacgataaggagtggtgccatcgtctaagcgtccaccaaagtttaagtcattgaaactttcgcacgcggaaggatggttggtgaggcagttttcgcagtgatggcaggcggcgtagctcagtaccacgtgatcgccaatttcgaccccacgaacggcatcaccgacgttaaccacgatacctgcgccttcgtggcccagaatggcgggcatcggcaggatcccggcgttatcgcggatcaccgcgtcggtatgacagacgcctgtagcgacaatttttaccatcacttcgtcttttttaggggcgctaacctgaatatttttaatgctaaatggctgttgataacccaacgtcacggcggcttttactttcattagatactcctgacatttttccctggagaatagagattacacctgacgtgatgaaaatttatcctgttcgtgctgaaaataaacaaagtgcgggtaaaaacggttaggtatcggatccgcgcgtgttcgccaaaacagctcagcgatagcgatcgctgggtggttattcagtctgttccggtggacatcttttttttcatgcttttcgcctgccaacaattggattatcaatcatttttgtctagagtgagcggaattcacgacgcagatgtttgcaacgttgcgtatccgtcgaactctcaaaaaggacgcttttccaggcatgaaccgcagacgttttcttaaatcatccatggctgttgccgccgtatgcggaacgtcaggagtcgcctcgttatttactaaagcggctttcgccgcggattcagctatcgccgatggccagacgcgccgctttgacttttccgtcctgcaggcgatggctcatgacttagcccgccagccgtggggcggcgcgccgcgtgacctgccgccgacgctagcgaatctgacccctcaggcctataacagcatccagtatgatgcggcgcattcgctgtggaataacgttgaagagcgtaagctggatatccagtttttccatgttggtatgggcttccgccgtcgtgtgcgcatgttctcgctggacgcgcagtctcagcaggcgcgggagatacatttccgtccggagctgttccagtataacgacgccggcgttgataccaaacagctggaagggcagaccgatctcggtttcgccggtttccgcgtgtttaaggcgccggaactggcgcgccgcgatattgtcgccttcctgggcgccagctacttccgcgcggtcgacagcacctatcagtacggcctgtcggcgcgcggtctggccgttgacacctttaccgatacgccggaagagttcccggatttcacgtcattctggtttgaaaccgtcaaaccttgcgcgacggttttcaccgtctacgcgctgctcgatagcccgagcgtcaccggcgcctataagttcaccgtgaattgccaggaaacgcaggtgatcatggatgtcgaaaatcatctctatgcgcgcaaggacattaagcagttgggcattgcgccaatgaccagcatgttcagctgcggtaataacgaacgccggatgtgcgataccatccatccgcaaatccacgattctgaccgcctgtcgatgtggcgcggcaacggcgagtggatttgccgtccgctgaataatccgcaaaaactgcagttcaacgcgttccaggataaaaacccgaagggatttggcctgctgcagctggatcgcgatttcagtcattatcaggatgtgatgggctggtataacaagcgcccgagcctgtgggtggagccacgtaatcagtggggaaaaggggccgttagcctgatggaaatcccgaccaccggcgaaacgttggacaatatcgtctgcttctggcagccggaaaaaccgataaaagcgggtgatgaactggactttagctaccgcttgtactggagcgcgcagccgccggtacgctctccgctggcgcgagtgctggcgacacgcaccggaatgggcggcttcccggaaggatgggcgccgggtgaacactacccggacaaatgggcgcgccgctttgctatcgattttgttggcggcgacctgaaagccgcggcgccgaaaggcattgagccggtgattactctctccagcggtgaggctaagcaggtagagatcctctacgtcgagccgtttgacggctatcgtattctctttgactggtatccgacttcagattccaccgatccggtggagatgcgcatgttcctgcgctgccgtggcgacgctatcagcgaaacctggctgtatcagtatttcccgcctgcggcggatcggcgtaactacgttgatgaccggattatgaaataacccaggtcgttgaaatccgcccgcggtgcgctaccgcgggcgttgttgtttatcagtgagatattgtcatgactgccgaaaatagccccgccatcgaaactatcccggtcaacgaacagctggagctgcgtgcggttgacgaacgttacgtcaatgagctacatcaactggtgctcaaaaaccgtgactggttgcagcatacgttaagctggcctgcggaggtgctgagtgaagatgaaacccggcgccacgtgcagggaaacgtgatgctgcaccagcgcggttatgcaaaaatgttcctgctgtttttacaggggcagatgatcggcgtcctgtcatttaaccagattgaaccattgaataagacggcctatatcggttactggatcgatcaaagccatcaggggcagggactgttgtcgcaggcgttacaggcgtttatccatcattatgcgcaaacgggcgccgtgcgccgtttcgttattaaatgccgggtcgccaaccagcgcagtaatcaggtggcgctgcgtaatggtttccaactggaaggttgtctgaagcaggccgagtttttaaatggcgcatatgacgatcagaatatctacgcgcggattatcgacccgcaataagcggctatagcgaacccagcagcggcgtacgggtgatatgctcgtcgccgctcacgatttttcgcccgcgaagatgaatactgtcaccctccagcgcttcgatacaggcgttaccgcagatttctacctgatgttcgataaccacatcacctctaatcgtcgcatgtccttcgataaggacctcgtcatccagcagaatggggccgccgagaagatgggcgtgcccgccgaccatgacacgatgttttaacaggcagttgccttcgaccacggcgttttcgcccacttgtgaactgtagcgcagggtcgggatctgatcctcgccgcgcccggcgaccagccgcgcgcgatcgtagacccgggcgttgtcacatatccatacatcgttattttcattaccttcaatacgtgcgttatcgaacacttcggcacggtgttcaacaaaagcatgctcaaccacggcatcgccgtaaatttgcgcctggtgaacaatccgtgaggcgctgaccgtggcacgttgataaatttgcagcactttgtcggcatcagaagtgagtccctgagcggcaatcaccagacaatgggggagaatacgcgcatggtcggcgattcggcagacgccacggatttgcgattgttttatggtgacgttgtcacttatcctggcgccatggctaacctcaacattatcaagccaggcattatcgctaattgtcgccccatggcttatcacgcaggtgccggtcagacgggcgttgtcgtcaacgcgcgcgccggcgaaaacgacgctgttggcatcatatacccagcagtcgccgccctgacttaacgcggcttcatcatcgagccagccaccttcgcttcccgccttaacgtccgagaaattaattagcgccacgatttgccgcagagttacgctatgtttaatcccgtcttcttcaaagtgatacaggcggacgtggtcgctcagacgatatttcttcatcagcatttctctttactgttggttaacataaacatagcaaaaatctccgtagcgcgttttataaggttcctttaaaatgcaacttaaaattaaattgaaagtttaaataaaatgaataacaacgcagcgagcggccaggtgctgaatttaccggctggctattttggtatggtgcttggaatcatcggcatgggtttcgcctggcgctatgccagcaccctgtggccggtgagcagggttattggcgatgcgctggtagtgctggcgacaagtatctgggcgctattaatgttagcgtttatagcacgggctattcgtttcccgtggagcgtgctgcaggagatgcgtcatccggtggccagcagttttgtcagcctgatcccggcgacaacgctattggtgtcgatcgcgtttgctggctggtatcgcccgttgtcgctggcgttgtttgctgcgggcgttacgctgcagctttgctatgcggcctggcagaacgccgggctgtggcgaggtaaacatccgggagaggcgacgacgcccggtttatacctgccgaccgtcgccaacaattttatcagcgccatggcctgcggcgcgctcggatttaacgaagccggactggcgtttctcggcgctggcgtcttttcctggctcagcctggagccggttatactgcagcggctgcgcagcaacggcgagttaccggcggcgttgcggacatcgttgggtatccaactggcaccagcgctggtggcctgtagcgcgtggctcagcgtcaacggcggcgaaggtgatacttttgccaaaatgctatttggttacgggctgctgcaactgttgtttatgctgcgcctgatgccgtggtatctgcagcagccgtttaatgcgtcattctggagcttctcgttcgggatttccgcactggcgaccaccggcctgcatctgggacacggtcagccagacggttttttccatacactggcgatccccttatttatttttagtaacctgattatcggcctgctgctgctgcgtaccttacttctgctggtgcggggtaaactgttcattcgcgtagaccgtgccactttattgccaaacaaggattaatcatgacgactcgtgacgaaaactactttactgaaaaatatggcctgacgcgcacccactcagaagtggtgtatgccgcctcgctgatgcagccgtgccggaccctcgacctcggttgcggcaatggtcgaaacagcctgtatctggcggcgaaaggctataacgtcaccgcgtgggataaaaatcccatgagtatcgataatctggaaaacattcgtcaggccgaagcgctggagaacctgcaaacagcgattaaagatctgaatacgctgagctttgagggcgagtatgattttattctttctaccgtggtgatgatgttcctggaagccaaaaccatccctggtcttatcgccaacatgcagcgctgcactaaacctggcggctataacctgattgttgccgcaatggataccgaagattacccttgtacagtgggcttcccgttcgccttcaaacctgaagaactgcgtgactattatgctggctggcagttcatcaagtacaacgaagacgtcggcgaactgcaccgcaccgacgccagcggcaaccgcatcaagctacgcttcgccacgatgctggcgcgtaaaccggcttaatccgctgccagcaggcagagttgcagggcggtaagataggaagcctcaaaggcgcgcagcggcaaaaattcgaatttcgaatggaaattatgcgcgccggtgaagaagttcggcgtcagcagaccctttgccgacagcgctgcgccgtcggtaccgccgcgcattggcgtgggttttggcgttataccgaggctttccatcgcggtgaacatcaggtcaatagcccggcggtcttcgccaatggcgttactgatattgctgtaagtatcgctgatagtgaattcaaccctggcagtagggtactgggcggcgattttctctgccgcttcgccaatctgttgtttacggcggttaaagctgtccagatcgaaatcgcgaatgttggcctgcaaccgtgtgctgttctgatcgccatgaataccgttaaaccatatgtagccttcgcgcccggcggtgtgctccggcgtctgctggcggtcgaaatagctcataaagtcggtagccattaacagcgggttgaccaacacgcccttggctgacatcgggtgcgccgtgaccccggtaaaccgtatctccgcggaggcggcgttgaagttttcataaacgagctcgcccagttcgcagcagtcgatggtccaggcaaaatcgacggcaaaacgcgatagatccaacgcttttgccccacgaaggccaacttcttcgtccgggacgaatgccacgacgatatcgccatgcttatgttcggcggtcaggttttccagcagcgtcataacaacggtcaccgccgctttgttatcggcgcccagtacgctggtgccgtcgctgaaaataatctcttcatcacgataggccaggatttccggatgctcgtcaacccgcagccagatttgctgttccgggttaaggcagagatcttcaccagtaaatcgcaggatttgtggatgaatatccggcgacaatccgacatcaacggtatcaatatgcgtgataaagccgatccgcggcgcaccggggacggtgcctttttttaccgccgtgacggtcgcatgctcgtcgacaacgatatcgtcaaggccaaactgacgtaactcgtcggctaacgcctgcgccatctgatgttgtccgggcgttgtgggtaacgtggttgctcgtggatcgctttggctggtgatagccagatagcgaaagaagcgctgggttaattgtctggttaagggcgaggccatagtgattccttcttaatttattatttcgggtgtttgcaatctggctttagtgttatctatgggcaataaaacaaaaagctattcattagtcaaaaaatgaaaagggaaacgcatgcaacgcacatctacttcaatagctctgacgatagcggcattagcggtgagttccgtcgtgaatgcgaaaacactggtttattgctctgaaggctcgccggaaaactttaatccgcagctttatacttccgggaccagcgtcgatgccagcgcggtaccgatatataaccggttggtggactttaaagttggcaccacggaattgcagcccagtctggcagaaagttgggaggtgagcgaagatggtaaagtttatacttttcacttacgcaaaggcgttaaattccaaagtaataaatattttaaaccgacccgtgattttaatgctgatgacgttattttttcgtttatgcggcaaaaagatccgaataacccttatcataatgtctctaatggcaactactccaattttgaaagcctggagtttggttcgttaattaccgcaattgataaaccggatgaatatacggtgcgttttaccctcgcgcacccagaggcgccttttgtcgctgacctcggctggtattttgcttcaatcctctctgcggaatatgccgatgcgatgctgaaagccggaaccccggagcgcgtcgatatggatcccatcggcaccgggccatttaagctggcgcaataccaaaaagattcgcggatcttgtttaccgcatttcctgattactggcagggaaaagcgaaaatcgatcgtttagtatttagtattacgcctgatgcctcggtgcgttacgctaagcttgagaaaaatgagtgtcaggtcatgccattccccaatcccgccgatttaccgcggatgaaagagaatccgcagatcaatctgatgagcaaagccgggcttaataccggtttcctcgccttcaacacgcagaaagcgccgctggataatgtgaaggtgcgccaggcgttggccatggcgattaataaaccggcaattatcgatgcggtgttccacggtaccggtacggtagcgaaaaacctgctgccgcctggcgtctggagtgccgatgccgatctgcaggactatagctgggacctggaaaaagccaaagtgctgctgcgcgaatccggcgtgaagagtcccatcaccatcgacctctgggcgatgccggttcagcgtccctataacccgaatgcgaaacggatggcggaaatgatccaggctgattgggccaaaatcggcgtgcagaccaaaatcaccacctatgaatggggcgaataccttaagcgggtgaaagacggcgagcatcaggcggcgttgatgggctggaccaccgcgaccggcgacccggataacttctttggcccattatttacctgccagtcggccaacggcggttctaattcggccaaatggtgctatgcgccgtttgataaaattatcgccgaagctaaaaccatcaccgaccggccgcaacgagaagctttgtataaacaggcgcagcagatgatgcatgatcaaatgccggccgtgatgattgcgcattcaactatttttgaaccggtgagtaaatcggtgaccgggtatgaaatcgacccgtttgggaagcatattttttatcaggtggacgtaaaataagcatcgtaaataaatccgccgcgttggcggatttattttttgcaaggagttgacggaccaccatttttgtcacaaaactaagcgtgaaattttgttataaaccttgccgacaaactgcatttacagggattatccatgcgtacaaaaatgttatttaaagtagccgctctggccgggctactggcattaactggttgtgcatccaaactggcgcaaccggagcagtattccgggttcttaaaagattattctaagttaaaagagaccacttcggcttccggcaaaccagaactgcgctggatctccccggactacaatccgagcaactatgacaacgtcgtctaccgtccaatcacctactacccggtgccgaaaccaacgacccaggtaggggagaaagcgctgcaggacatcctcaattacaccaacaagcagatgaaacaggccatcagcgaacgtaagccgttggcgaccacggccggtccgcgcagtctgattttccgcggcgcaatcaccggtgttgataccagtaaagaagggctgcagttctatgaagtgatcccggtggcgatgattgtcgcgggtacccaggcggcaaccggccatcgcacgatggacactaatctctacttcgaaggcgaactgatcgacgcgaagactaataagccggttattaaggttgtgcgtaagggcgaaggtaaaacgctgtctaatgagagcacgccgctgaccgctgatacgttgaagcaggtgattgatgatatggcgattgacgcggtgaaattcgatccgtcgcagaagtaactaatgacgttaagcccgacaggcgtaatgcctgacgggcttattattaagccagccggcggcgcataaatagctgttctgggcgggcgaacatcaccagatttcctaccagtattaacgccagacctatcaccgcgttgctatgccagacgtaaccttcatagaaggtggagatagttaatgccaccagtgggaaaagcagcgtgctataggctgctttactggcgccgatacggcctaccagggtgaaataagcgccgaacgcgatcaccgaaccgaacaacgccagatacagcagggcgcccatataactccaggtccactgtggcataaagttatcgcctcgtagcagcgcgatcgcgcccatcaccagcgtgccgtaaaacatggcccagctattggtggtcaatgtctcaagcccgcggcgttggtggcgaatactcagcatgttgcccaatgaaaaaccgtacgttcccagggcgctcaggccgattccccacagcagcgacgcgttcagaccattggcgaggagatcgtcccagaagagggtgacaattcctgaaagccccagcgccgctgccagccaaaagcggcccggcggctgctggcggaagaaaataaaactgttgatcgcgttaaataagaccgccatcgaaaagatgaccgactcaaggccggtattgatatgcgccgcggcggtataaaaacaccagaagttaaagcagaagacgcagcagccttgcagcatgcaaaacagatgatcgcgaattgccagcgggcgcaggcggcgggtaatcagcaaaatcgtcagcattgtgacgctggcgacggcaaagcgccagaaaatcgataccggcgcggcgacgggcccctgttgtaaaaagatagcaatccatgtagtaccccagataaccaccaccagcccgtagagtaatgcgttcaaaatgtctctcctgtgagtatgcctggcgtaagtgtgcggtttttccgggcaaagcgctgtcagctttttgttgctgacttgcaaaatcttgcgcttatttttcacaagctcatggtcaatgctggtaagcggtgatgacaattcatagactagaggtctgcggaataaaaacgatgtgaagactatggcatacgggacgttcgaaacattacaacaacaaaatgcggtgctgcgggggaccgtagaactcaattccgggatccagcttgccgcgtggtacaacgacctcgatcggataacggtgcgcagcgaccaccacacgttgagcctgtatgtcgccgatggttacgaaagctaccaaaaaacaccgtacggctggaagaatggcggcgggccggaccgtttttgtctgatgccaaagggggatgaaagcacctgggatattcgcggcgatctctctttcgttcatctctattgcaccgatgagcacctgcgtcgcgtcggcgagcaaatttgggatcgcagcccggcgtctttcaccttgcaggaaaaaacctttgccagcgatgacaaaattaccgcggtgtatcgccagtttctgcttgagaacgactggcgccagcaggctaatcaactgctattaagctccgccagtacattgctgttaactcatctgattcaaaactattcgaacgtgcagtggcgcctgccgacggttaccggtggcctggcgccgcatctattacgtaatctgttggcgtggattgaggagcatctcgagcagccgcttacgcttgccgatctagccgcacaggcatcgcttagcgagtaccattttgcgcggatgttccgccagtcaatgaatatggcgccgcaccagtatgtgatgcagcggcggatgattaaggcgcaaaatctgatttgccacactcagcagccgttgactgagatagcgctggcctgcggatttagctccgccagccactttagtcaccgggttaagagcgccacgggtcttacaccaagccagctacgcacggcgcagcgtggttaacagcatatagctgataccgccgatgaccagcccccaaaatgccgagccgactcctgccagagagacgccgctggaggtgactaaaaatgtcaccactgcggcatcgcgctcgttttcattccccagcgcctgatagaggctaccgctaatggttcctaacaatgccagccccgccagcatttggatccacaccggcggtagcgccgccattagcgcggttatcgaaccgccaaatagacccgccacaagataaaaaaaaccggccgccgctgcggcgagccagcgtttaccggcatccggatgcgcatccgggctttgacagatcgcggcggtaatggcggcgatgcacacggaatagacgccaaatggtgagaataacaacgccaacgcgccggtaaatacgataagcggcgagaccggaacccggtagccggaggcctgaatggtcgcaaggccgggcgcgttctgcgacgccatggtgacgaggaaaaacggtacgccgacgctgagcagtagcgaaggggtgaattgcggcgttatccaccgcggtgcaacaaaaaccatatcgtttgccattggcgacagcgcgccggttagcagggcgatgatcccgcctatggccaacgccgcgaccaccgcaaaacgtgggtaaagcgctttgcataatagccaagcggcgaacatcccgccgcatagcaaaaggttatcttgcaaaccgctgaatgcctgcagaccaaagcgcagcaggatccccgccagcattgccgccgccagcgaatgcggaatgattttcatgaggcgggcaaacagtcccgtcacgccacacagcaggatcagtgcgttggcgaaaacaaatatccccaccgcctgcgccagcgtcgccccctgtaaaccactgaccagtaaagccgcgccggggttgaccatgcggtgaggatggggacttttcgccataacgttaataccagcgtgctgacgcccatcgccaggccaagtgcggtcatccagccggctatttgcccggcgtcggcgccagcggcggcggccgcctgccagatgatggcggcagagctggcatagcctaccagcacggcgacaaatcccgcgagcagcgtggggatgggaagggtaaaggagcgcatgaacacctcttgtgcgttataacatacgacgaaggtagcattgtgcgttatagcgcacaactggtaatatcaagaaaatgatgaggagccatccatgaatattgcgcaacatctggcaacgacgctgaaaagcctgcgtcagcagcgcggctggagtttgtcgcggctggcggaagaaaccggggtatcgaaagcgatgctcgggcaaattgaacgtaatgaatccagtccaacggtcgcgacgttgtggaagatagccaccggtcttaatgtggcgttttcgacgttcatcgttgccgatgagacggcggcgcccgccgccttcgatccgcagcagcaggcgatggtggtgacgccgattttcccctgggatcctgagctgcgctttgaccatttttcgattacccttgcccccggcgcgctaagcgaatcaactccgcatgagaccggcgtcatcgagcatgtggtggtcattagcggtacgctggatttatgtctgcaggggcaatggcagacattgcaggcgggagaagggcggcgctttgccggcgatcttgcgcatgcctaccgcaatagcggcgcgcagacggtgcactttcattcactgattcattatccaaaagaaaaagccgcgagctaatccgcggccaatcaagatgactgagactaaaattcacaacgtgacgaggaaaatccggaatacgcagccactgtaaccttgccgggttttcatgagaaatagctttttcttcaatgctttgccgatttctgcaaattcgctgtttgagcgtggcggaaaatgttttcgtctgcgcccagttctgactacaatagccgccatttcgacccctataacggataacgacgagcgtatgcgcctgcaaaaccatcaccttgaacttcttagtcctgcccgcgatgccgggatcgcccgtgaagcgattttacacggcgccgacgcggtctatatcggcgggccgggcttcggcgcgcgccataatgccagcaatagcctgagcgatatcgccaacctggtgccgtttgcgcatcgctttggcgcgaaggtatttgtaacgctgaataccattcttcatgatgatgaactggaaccggcgcaacgtctgattaccgatttgtatgagaccggcgttgatgcattgatcgtgcaggatatggggataatggagctggatctgccgccgattgagctgcatgcgagcacccagtgcgatatccgcagcgttgagaaagcgaagtttctctctgatgcgggcttcagccagattgttctggcccgtgaactcaatctcgatcaaattaaagcgatttacgataataccgacgcgaccatcgagttctttattcacggcgccttatgtgtagcctattcaggccagtgctatatttctcacgcgcaaaccgggcgtagcgccaatcgcggcgactgctctcaggcttgccgcctgccttacaccctgaaagacgatcaggggcgtgttgtggcctatgaaaaacatttattgtcgatgaaagataacgatcagaccgccaacctggcggcgctgatcgatgcgggcgtgcgttcttttaaaattgaagggcgctataaggatatgagctacgtgaaaaatatcaccgctcactatcgtcagatgctggatcgtattattgaagaccgtggcgacctgacgcgtgcttccgccgggcgtaccgagcacttctttgtgccatcgacggataaaacgttccaccgcggcagcaccgattactttgttaacgcccgtaagggcgatatcggcgcgtttgattcgccgaaatttatcggcctgccggtaggcgaagtattaaaagtcggaaaagattatctcgatgttgaagtgaccgacgcattgacgaacggtgatggcctcaatgtgatgatcaaacgtgaagtcgtcggcttccgcgccaatacggtggagaaaactgcggaaaaccgttatcgcgtctggccaaacgaaatgccagcagatctgcataaagtgcgcccgcacgaggcgcttaatcgtaacctcgaccacaactggcagcaggcgctactgaagacctccagcgagcgccgcattgcggttgatatcacgctgagcggctggcaggaacaactggtgttgaccatgacctgcgaagacggcgtgagcgtcacgcatactctggatggcgaattcgccgaagcgactcaagcggagaaagcgctggccaatctgcgagatggcgtggcgaagctcggccagaccatttactacccgcgtgatgtgcagattaatctgccggcgctgtttgtaccgaacagtatgctcaaccagctacgtcgtgaaacggcagagatgctcgatcaggcgcgtctcgatgcctggcagcgcggaacacgtaaaccggtctcggtaccgccgccggtgtatccggaaacgcatctgtcgttcctggcgaacgtttataaccacaaagcgcgcgctttctaccagcgctatggcgttcagctgatcgatgcggcttatgaagcccatgaagagaaaggcgacgtgccggtgatgatcactaagcattgcctgcgatttgcctttaacttgtgtccgaagcaggccaaaggctcgattaagagctggaaggcgacgccgatgcagttgatccatggtgatgaagtgctaacgctgaaatttgattgccgcccgtgcgaaatgcacgtagtgggtaaaatcaaaaatcatattctcaaaatgccccatccgggaagcatcgtcgcctccgtcagtcctgatgagctgatgaaaacgctgcctaaacgtaagggcgcgtaagaaccattcttacggcgggcagttatgcgtttttgctttacgcgcatactgacggtgatgatgctctcgcagtgagctggaggtctcctcagcccggctgcgtagttcatcgcaatcagcctcgtgcagtaaccgctgttcgaggctttgcaccgggaaataatcatgcccctgacgctgggcgagcagatgcccggaaaataacccacacatcaataccactgccgctattcctctccgccacatatcattttccatatcaatagataacgcgtgattaatatgattgattcaatattggtttttttatggcgttatcaaagaagcgcaaggctttgtcaggcgtggctgaagaaggatgaaaaaagcctgacgcgattaacgccaggctgtagatgtgttatttcaggcgcgaagcccggcggcgttcatcagcaggcgaaaaatcatactgacggcgcccagcgccagcacgctagctccccatatggctgccagccatagcagacgttttatccatgagcgctgcatcagtgatacccctcgccagcctggactttgccgcggaagacgtagtagctccagaaggtataaccaagaatgacgggaataatcagtagcgcgccaaccagcataaagccctggctttgcggcggtgccgcagcctgccataacgaaatcgagggtggaataatattcggccaaatgctgatcccaagtccgctaaacccaaggaagacgagcgccagcgtcaacacgaacggcagggcgtgagtgtctcgttgcccaagcgtgcgccataaccaggcgctgatggagataaccaatagcggcaccggaagcaggtaaaacagattcggcagactaaaccagcgctcggcgattgccggctgagagagcggtgtccacaaactaatcgcggcgatcgccaccaataaggccagcagaagaaggcgtgaaattctacgcatggtatcctgcagcggattctcgcttttcatcaccaaccaactggcgcccagtaacgcgtatgcaacggtgaggccgagtccgcagaatagggtaaatggcgtgagccaatcccacattccgccgctaaagctgcgaccgctgaccggaaaaccatgaatgaccgcgccaacgaccatgccctgggtgaatgtcgccagtagcgacccgccgagaaaagccttgtcccagaaaggacggtgcgagggggtcgctttgaagcgaaactcgaaggctacgccgcgaaaaataaggccgattagcatcagggttaacggtaccgacagcgcgtcgataatcaccgcataggccaacggaaaggcgccgaagaggcctgcgccgccaagtaccagccaggtttcattaccatcccataccggggcgacgctgttgaccattacgtcgcgctcatcaccgccgcgcacggcggcgaacaatatcccaatccctaagtcaaaaccgtccatgacgatatacatcagggtagcgaacacgatgataacaaaccaaataaccgataaatcaatacccattagcgggactccttgtgctgaaaaccatccataacggcagaaagcggacgcgccggcgtacctgatggcacaggtgtctgttcctgggggcctttgcggatcaggcgcaacatatagctatagccgacgccgaataccgagctatagacggcaataaaggcaagcaggctaatggtcatgtgcaaatcgccatgcgctgatacggcctcagaggtgcgctgtatgccgtaaacgacccacggctggcgcccgacttcggtagtcacccatccagcaagaatcgcaatcaggccggaaggccccatccataacgcgaagcgcaggaaaggttttgaggtatacagacgctgccgatagcgcagccatagggcaatgacgccgagcagaatcattaacattcccagtccggccatcagacgaaatgaccagaacacaacggttgagttggggcgatcttccggagcgaactccttcagcgccggtacctgtttatcgaggctgtgagtcaggatcaggctgccgagggcagggatctccagcccatagcgggtacgttcttgttgcatatccggccagccaaagagcagcagcggcgtcggttcgcccggcggattttcccagtggccttcgatggcggcaattttcgccggttgatgtttcagggtgtttagcccatgcatatcgccgattaatgcctgaatgggggcgacaagcagtgtcatccatagcgccatagagaacatggcacggatggcgggggtgtggttgccacggagcaaatgccatgcggcggatgcgcccacgaacaacgcactgctaagaaacgccgcgacggacatgtggaataagcggtatgggaaggaggggttaaagataacggcgaaccaatcaatgggtacgacctgaccgttaacgatttcgaagccttgtggcgtttgcatccagctgtttgaggcaaggatccagaatgtggaaatgatagtgcccagcgccaccatgcaggtggcgaaaaaatgcagaccggggccgacgcggttccagccaaataacatcacgccaaggaaaccggcctcaaggaagaaagcggtaagaacttcataagttagcagcgggccagtaatgctgcctgcgaactgagagaaaccactccagttggtgccgaactggtaggccataaccagccccgagaccacccccataccaaagttgacggcaaagattttcgaccagaaatgatacagcgagcgccagacaggattctttgtttttaaccataatccctcaagcaccgccaggtagctggcaagaccgatggttatggcggggaagataatatgaaatgagacagtaaaggcgaattggatccgcgccagatgaaatgcatcaagaccgaacatgctggactccacaacaaaattgattcaacgcaattttaaggggtggcggggagtgatagcagaggcagaaatggggttttttatgataacagtatagactgttatcctttttatacatatttcatatttatgaaatatgtatttatgtcatcatgaataatgaattgctggttgtgatctttttttaatgctacttcacatgtttttttacgattttccttagtgcttctcctgctttctattaattactctggtagattggaaatgtttggtgtttaatgcaaacgcgaggttcaagtatttacattttatatgtgaattctttatttattgttttttgatatatttggtgagtggagataagggaggcgacttgtcacagaacggactgcgaagtttgtgtatcacattggcgctaatgagtatcttttggctggttgtgtttggcggactctatcttgttttttgaattcaacggttacatccagaagagattgcattccccggtgtgtgattaatttgtttgatatcagtgctttgctgtttttatgccaggtgcactgttcagtggacaatggtttaggtgcgttaaattatgtcaaaaagactggcgaggaatgaatttatcttattgtgaattttccttagtggaggagttgttgattcataattaaatatcaaggcgtgtttacgttggtgccagttgggatctcaacgatagaccatgacgtatggttcataaatcaaatgaatattggtgattatgaagcgtttatcaatgtaacctaaatgcgaacattatattaacgctagtagggtttgatggtatttcagtagtaaagttaacgcgcgagtattattcctgcactggttcaagaagcgcattgttgtatatcagttattagaacctgccatttttagtcaactgttataagatatgagtctcgattgttaaatggatgcggtaatgaaaaagtatcagcaacttgcgcgacagttaactgaacagatcgcgcttggcgtttggcaacccggcgatcggctgccctccttacgcgaacaggttgtcagcagcggaatgagctttatgaccgtcagccatgcctaccagttactggaaagccagggacgtattatcgctcgtccgcaatcgggttattacgttgcgccgcagccggtgaagcagcgccaacctgatccccggcacaggtgacgcgcaatgagtcggtcgatattaacacttatattttcgacgtcctgcaggccagccgtcaggcatcgatgctgccttttgcctccgcctttcccgaccctcgtctgttccccttgcagcagctaaatcgttctctggcacaggtgagtaagaccgccaccgccatgagtgtgattgagaacctgccgccgggtaacgatgagcttcgtcatgctattgcccggcgttatgcgttgcagggaatgaacgtatcgccggatgagatcgtcattaccgctggtgcgttggaagcgctaaacctcagcctgcaggccgtgactgagcccggcgactgggtcgtcgtagaaaatccgtgcttttacggtgcgctgcaggcgctcgaacggttacgacttaaggcgctatcggtggccagcgatgtgaaagaggggatcgatctggccgcgctcgaacaggcattgcaaagttacccggtaaaagcctgctggctgatgacgaatagccagaacccgctcggatttacgctgacggcggacaaaaaagcgcgactggtagcgctattgacgcgctacaacgtcatgttaattgaagatgacgtttacagtgagttgtactttggacgggaaaaaccgctacccgcaaagtactgggatcgtgatgagatgacgctgcactgcagctcattttcaaaatgtctggttccgggttttcgcatcggctgggttgccgctggcaggcatgcccgccgtattcagcaattgcaactgatgagtacgctatccaccagttcgcccatgcagttggcgctggtcgattatctttcgaccaaacgctacgacgcgcatttacgccggttgcggcgtcagcttgccgagcgaaaacaactggcctggcaagcgctgctacgttttttacccgccgaggtcaaaattcatcatagcgacagcggttatttcctgtggctggagctgcccgccggcattgattctggtgaactcagcgctctggcgttacgggataacatcagtattgcgccgggtaaaatgttttcaaccaccgctaactggacctcgtttttccgatttaataccgcatggggctggggagaaaaagaggagcagggagtcaaacggctcggcgaacttatacgtcaacttttgccttagtttattcatcgctattttttttattgccggtttatttttctccggcaattaatttttctcattctcgtattcattaatcagggttaaatacccgctcacgccgggctgtcatagggaatatgcatactcatccctatgccataactccttgtctataatccatattatcgaatcgtggcggcgatttttgcggaatgcgccccgggtcacaacctgaggaaatttcccctgaggcccgcaggccgccgtctacccttattaagggagatatttttacggcacggctgccgctacttttattctgacaggagtaagttcaaatgagcaaaaaatttgcccgtggcagcctgtgcgtgctgagtatggtttttgttactgcgcaagccgcagaaccgccgacatcgctggataaaggcgaaggacggctcgatattattgcctggccgggttatatcgaacgcggccagacggataagaattatgactgggtaagtcaattcgaaaaagagagcggctgccaggttaatgtgaaaactgccgccacctccgacgaaatggtcagtttgatggcgaagggcggctacgatctggtcaccgcatccggcgacgcctcgttgcgcctgattatgggcaagcgtgtacaggcgataaataccgcgctgatccccaactggaaaacacttgacccgcgagttgctaaaggcgcgtggtttcacgtcggcgataaagtgtacggcacgccctatcagtggggccgaacctgctgatgtacaacaccaaaaccttcccgacgccgccggatagctggaaagtggttttcgtcaaacaggatttaccggacggaaaaagtaaccagggtcgtattcaggcctatgatggtccgatttatatcgccgatgcggcgctctttgtcaaagcaacgcagccgcagttgggtatcaacgacccctatgagctcactgaaacacagtatcaggcggtgttaaaggttctgcaggatcagcatccgctggttcaccgttactggcatgatgcgaccgttcagatgagcgacttcaaaaatgaaggggtggttgcttccggatcctggccatatcaggctaacggtctgaaaggtgaagggcagcccattgctaccgtcttcccgaaagaggggtgaccggctggtctgataccacgatgctgcatagtgaggcgaagcatccggtatgcgcttataagtggatgaactggtcgttgacgccgaaggtgcagggcgatgtcgccgcctggttcggctcgttgcctgtagtgccgcagggctgtaaggccagtgcgctactgggagataaaggctgcgaaaccaacggttataaccaattcgacaagattgcgttctggaaaacgccgattgccgaaggcggcaagtatgtcccttatagccgttggactcaggactatatcgcgattatgggtggccgctaagcgcctggagactgaacatgacgtacgcggtagagtttaatgacgtttcgcgtctgtatggtgaagtgcgcgcggtggacggtgtgagtatcgccattcgcgatggtgaatttttctccatgctggggccgtccggctccggcaaaaccacctgcctgcgcttaatcgcaggcttcgaacagctatccggcggttcgattcgtatctttggccagcaggccagtgaattaccgccatggcagcgtgacgtgaacaccgtttttcaggattacgcgttattccctcatatgtcgattatcgacaatgtcgcctacgggctgatggtgaaaggcgtgggtaaaaaagaacgccatcttcgcgcccaggaagcattagaaaaagtcgcgcttggcttcgttcatgcgcgtaaaccttcacagctttccggcggtcagcggcagcgggtcgctattgcccgcgcgttggttaatcaaccgcgggtgctgctattagatgaaccgctgggagcgttagatttaaaactacgtgaacagatgcaggtggagttaaaaaaacttcagcaatcgctgggcatcactttcatttttgttacccacgatcagggtgaagcgctatcgatgtccgatcgtgtggcggtgtttaataatgggcgcattgaacaggtcgactcgccgcacgatctctatttacgtcctaaaaccgcctttgtcgccggattcgtcggcaccgcgaacgttttcaactcagaactatcccaacggctatgtggcgtatcaggcgcctggtcattgcgtccggaacatatccgcctgaatagcggcggtgatatccaggttcaggggaccgtgcaggcggtacagttccagggcgcgtcaacgcgtattgaactgaaacttgctgctggcgataagctgctggtcagtcaggccaatgtcgatggcggggcggcgttcagcgcgccgcagttggggcaacaggtattagcctgctggtcacgttcggcgatggtttccctggaaagcggaggctgagatgacgatggcgcttgtgcaaccgacgatcgggcgactgtcagggctgttctggcgaaaaccctcattgggcctgtttttactgctgctggggccgttgatgtggtttggtattgtctatctgggatcgctcctgacgctgctatggcaaagcttctatacttttgatgactttacgatgtcggtgacgacggatttgacgctcgccaacctgaaagcgctgttcaatcccgctaactacgacatcattatccgtactctggtgatggccatctgcgtgactattgccagcgccatcctggcgttaccgatggcgtggtatatggcgcgctatacccgcggcaagatgaaagcctttttttatatcgcggtgatgttgcccatgtgggcaagttatatcgtcaaggcctatgcctggacgctattgctggcgaaagatggcgtggcgcaatggtttctcggccatcttggcctggagagcgtgttaaatatggtattgaccatcccggcggtcggcggcaataccttatcgacctcggggcttgggcgattcatggtatttgtctatatctggctgccgttcatgatcctgccggtgcaggcggcactggaacgcctgccgccatcgctgttgcaggcctccgccgatttaggcgcccgcccgcaacaaaccttccgctacgtggtattgcctttagccataccgggcatcgcggcaggttctatctttacgttttccctcacccttggcgattttattgtcccgcaactggtgggaccgcccggtttctttatcggcaacatggtttattcgcagcagggcgcgattggcaatatgccgatggcggcggcattcacattggtaccgattgtactgattgcactctatctggcgtttgtgaagcgcctgggagcgtttgatgcactctgaacgcgcaccgttgtttctcaaaatcgccacctggggcggagtggtatttctccattttccgctgctgattatcgccctgtatgcctttaatacggaggatgccgcgtttagcttcccgccgaaagggctgacgctccactggttcagcgaggcgtccacgcgcgctgatattattgaatccgtgacgttgtcactgaaaatcgccgcgttatccaccgggattgcgctggtgctaggtacgcttgccgccggcgcgctgtggcggagtacgttttttggtaaaaatgccgtgtcgctgctgttgctgttacctattgcacttcccggcattattaccggcctggcgttgttgacggcatttaaagccgtgaatcttgagcctggcttgctaaccatcgtggtgggtcatgcgaccttctgcgtggtcgtggtgtttaacaacgtcattgccagatttcgccggacatcatggagtctggtggaagcatcgatggacctcggcgccacaggctggcaaaccttccgttacgtggtgctgcccaatctgggttcggcgctgctggcgggcggcatgctggccttcgccctgtcctttgatgaaattatcgtcactacttttacagccggacacgaacggacgctaccgctgtggttgttaaatcagctggggcgcccgcgcgatgtgccggtcaccaacgttgtcgcactgttggtgatgttagtgacgactgtacccatcctggggcctggtggctaacccgtgacggcgagcataacgccgaaagcggaaaataatacactttacaggatcatgctatgcaacataaccttttgataaacggtcaattagtggcgggtgaaggcgaggtgctgccggtattcaatcctgccaatggcgaaacgattattgagattgcggaggcgaccgaggcgcaggttgatgccgccgtcaatgctgcagatcgtgcgtttgtcagctggagccagacaacgccgaaaactcgcgccgaatgtttactgaaaatggcggatgttattactgaacatgcagaaacgctggcgaagctggagtctttaaactgcggtaaaccgctacattgtgttatcaatgatgaaatgccggcgattgccgatgtgtttcgcttcttcgccggcgctgcgcgttgcctgccgggaatggcggcaggggagtatctggagggacatacctcaatgatccgccgcgatccggtcggcgtagtggcctcaattgcaccctggaactatccgctaatgatggcagcctggaagctggcgccagcgctggcggccggtaactgcgtggtgattaaaccttcggaaatcactccacttacggcattgaagctggcggagctcgcgaaggatattttcccggccggcgtcattaacgtgctttttggccgcggcccaacggtgggtgacccgctcaccggccatagtaaagtacgtatggtttcactcaccggttcgatagccactggcgcccatattattggtcacacggcgacttcgattaaacgcacccatatggaactgggcggcaaagcgccggttattgttttcgatgatgccgatattgatgccgtcgttgaggggattcgcaccttcggtttttataacgctggtcaggactgtaccgccgcctgccgtatttatgcgcaacaaggtgtctacgatcggctggttgaaaaactaggcgctgccgtggctagcctgaaaatggggcaaccggaggatccgtcaactgaactggggccggtgagttcacttgcacacctggaacgggtgacagcagctgtcaacgccgctcgcgctttaccgcatattaaagtggtcaccggcggcagccgcgcggcgggcaagggctactatttccagcccacgctactggctggcgcccggcagaatgacgctatcgtacaacgtgaagtttttggtccggtagtcagcgtgacgtcgtttagtgacgaggaacaagtgttaacctgggctaatgattctcagtatggtcttgcctcttcggtgtggacgcgggatgtcggacgcgcccatcgtctgagcgcgcgcttacagtacggttgtacctgggtaaacacccatttcatgctggttagcgaaatgccgcacggcgggcagaagttgtctggatacggcaaggatatgtcaatgtatggcctggaggattacacggtggtacggcatgtgatggtgaaacattaaacattaacgtaccggcagcattaccaggctaatagttgcaatagcaacaaatgttaaaaaagattaggggtaatatgagagtattcttataccccttcaagagctaagccattgtgagtgccggagataagcgccggatggggtgtaaaccactaagcatgttattaataacgagatccctgcaggacaatgcggggattttttttatgtttcgtcttttataccgatgtaatgattaacgtttgtcttttttagatggcagaccagagtggcggcgctcgcgaatataagagattagactatagacggcgaccaccaataaaactaaagccattagcagggcaattattcctgacataagcgacctcaaataagtaagataaaacaaatacgttataacgaatagtcatgaacttatgtggaaacccgtgagtttgcaaataataatttctatcacttagcagaataaatagcactaaaaaacaaaataaaattgacagtccgcattaccaataaggctgaggcagtcgtccgttgagtctcgcacaggtcaatttaagaaaattctcaccccataaagtcagtgtagctaaatatctatcacaccgtatgaggaaggccagatcattttgttattgccaataatataaatattcacctgttagcaggagatcatttggcggataacttctggcgctaccgatagcggaaaatgttgattgtagcgataatgttaagtttatgttgagtatcacggcgagagcagttgctagtgtggatgtgatttgactttgtcgcgccgatcatgagaaaattttacataatttgttattctgaagttgaattggttttgaaaaagctagcttttctcttgttactcaccggcgtaagcgtgatgctttacggtaatctccctgcccagcgtattagtagttgtgaaagacaggggcaacggcgggcgtttgcaccgcggtagagtgggataatgaacagctaaatttcttgccgcaatataacccggaaaatgctaagactattgctgtgcttcagcaacaactttccggggcgcgcgcgacagttaaatcataaaaaagcagcccttgaggctgcttttttaggtttagttgctgaaaaaattactaaaaccaaccgaaacgaacggataacaggctaataagcgcaagcgctgcgccgacattaatcagaattacggttttgctggaaacatccataacgccacctttatgagtaagcccctacagttatagtcggtagcgcagtgttgtgctatcggacaacgctgaatcgaccatttttacagtgtcctggcagcggcttgttttgtgaggtgttgatctctgacgaattgagtaatgcgggacaggatggcgcgggtgacgcgatatctggcagggaaggaaaaaatgactttataccagaagatgctggttttttatgcagtgatgggctgtatttgcgcgttgataagctggtttttaaccaaggaaagccgttgtattcgcctgctggctgcgttgttaattggtgccacctggccattcagcttccctatggcgctgctggtttctctattctgaacggtgatttttgactctgcactggctgtcgtaccacagatggggcattcgatggcatgggaaaacccggccgcgctggcgcgcgtgattgccgggcaggtctgaatgcattgcgggaaatcagaacggtaattcgcgcgggcgagtttgcatggttatccagcgaagttcggtgaattcagcgattccggcgcgtccgccgaagcggccatagccggacgatttacagccgccgaaaggcatctgtgcttcatcatgtacggtggggccgttaatatggcaaataccggtttgcaggttctgcgccacattccaggcgcgagcggtatcgcggctataaaccgctgccgccaggccgtattcgctatcgttagccatggccagagcctcttcctcgccgttgacccgaatcaccgatttgaccgggccaaaagattcttcgtgccatattcgcatctcgcgcgtcacaccatccagcagggtggcgcgcatttgcgtcgactccgcctttccaccgcagagcaaacgcgcgcccttgctcagagcatcatcaatcaacgcgttgcagcgttgtaccgttttcgaatcgaccaccgggccgagaagcgttgaaggcagcgcggcggcacgttggctgattattgcgacgaactcatccgcgatgctctcatcgacaataatgcgttcggtggacatacaaatctgtccggcgttagcaaaagcgccaaaaatcgcgcccgccgctgcctgttgaagatcggcatcattcagtaccagtagaggcgctttgccacccagctcaagtatcgccggtttaaggtattctccacaggtgcgggcaataatgcgcccaacgggggtcgatccggtaaaattcacgcgtcgtatggcggggtgagcaatcagcgtttccaccagcgcaggcgcgtcggctggcgaacaggtaagataatttaccacgccgtcgggaaagcccgccgcggcgagggcatcaatgattaaactctgcgtggcgggcgagagttccgagcccttgaggatcaccgtattgccgcacgccagcggggtagctatggctctggttgccaaaatcagcggcgcgttccacggtgccatcgccaatacaacacctgcgccctgacgcaggcccattgccagattacccggcacgttagacggaatgatctgtccttcgatttgcgtggttagcgccgcggcctcacgcaaaatatccgccgccagatgcacgttgaatccagcccagtgcgccgtcgccccggtctcagccgccatggtggcgatgaatttcgcctctctaagctgcatttgcgcggcggcttccagcaacagccggcgacgctcggctggtgaagtgtcccgccatgaagggaatgcggcagcggcagattctgcgcagcgacgggcgtcattgaggctggccgctgcggcggtagaggctgtctcgttattttgcggatggcgacggataaaagtggcgcggccttcggcatcgtgccagcggccgccgctatataagctgcaggttatagtcattagcgtaacctcattggtctgcggagtgtcgagtctaccgccatacctcattgcgcagcggcgaaagggcggttatcgcacaacttttttgcagatttctcagcgggtcacaacttaataagataataatgacgaacagaaaagcgaggacggacacatcagaaatagaagtgccgcaaatagcgctaaccttatgagttaaagtgtgaatctaatagcgattcattatttgctggttgtaatccgctgtgctgttattagtgggcatataacaaatttataaggtttataaccatgtctacagggaaattactcttcgcactggcattaagcacgctgttgccagccggcgccgcgtgggcggcatccaacgacacgctggtctactgctcggaagcctcgccggaatcctttaacccgcaaatcgccagctccggcccttcctttgtcgccagctcgcaggtgctctataaccgcctgattacctttgatccgcttaaaaacacaccgattccgtcgctggcgaccgaatggaaagtgtccccggatggtaaaacctggacctttacgctgcgtaagggcgtgcagttcaacagcaataaatactttaagccgactcgcgatttcaatgccgatgatgtgttgttctcggtgctgcgccagcaggatccgcagcatccttatcacaacgtgtcgcagggcaattatgaatatttccacgacgtaggtcttgataagctgattaaagaagtgaagaagatcgatgactatcacgttcagtttgtgctgagcgagcccaatgcggcgtttctcgccgattgggggatggacttcgcttctattctttctgctgaatatgccgatgcgatgttgaaaaaagggacgccggaatacgtcgatagctggcctattggcaccggcccctatgcgctacagcagtacaaagtggattcacaaatccgttatatcgccaacccgcactattgggaaggcgaggtgccgactaaacatctgatcttctccatcacgccgaacgttgagactcgtctggcgaaactgcagaccaacgaatgccagatcattcccgcgccatcgccggtacagttcccggtgattaaagggaataaagatctggcgttacacgcggtggaggcgttgaacgtgggctatctggcatttaatattgaaaagaaaccgtttgataacgtactggtacgtcaggcgctgaactacgccaccgacaagcaggcgattgtgaaagcggtcttcctggattccggcaacgtggcgaaatcgccgatcccggccaatatgctcggttacaagaaggatttgccggattacgactacaatccgcagaaagcgaaagcgttacttaagcaggccgggttggagcagggagcagaagtgaccctgtggtcgatgccggtacagcgcccgtataacccgaactcgaagcgtgtcgctgaaatgattcagaatgactggagcaaagtcggcattaaagcgaaaatcgtcagctatgagtggggcgaatacctttccggtatgcgcaagggcgagcatgatagcgcgctgtttggctggatgtccgataacggcgatccggacaacttcgctggtacgctgctcagctgtgataatatcaaaaccggctccaacgtagcgcgctggtgcgataagtcctatgacgcgctggtgaaaaaagcgcttctggtgagcgatccgcaggcccgcgacaaactctaccaacaggctcaggaaattttctatcagcaggcgccgtggatcacgctggcgacgggtaaaactttctacgccacccgcagcaacgtcagcggctatagcgtgagtctgatgggaagcgatttttccaaagctaagctgaattgatcgaaaaggagaacaggatggcacatctggacgatgtcattgccagggtcgatgacaccattgccgggggcgtgattgcccctatgaacgagctactgatcgcgttaagcgatgatgctgagctgggccgcgatgagcgttatacccagcagcagcgcctgcggacagcgatagcccatcacgggcggcaacatcatgaagatcaggaagcacgccgcgagcagttaaccaaaggcggcgagatcctttaaggacgacgtcagaactggcgtctggccaccagccaggcgccaaccaccaacatcaccgccccgcatactggcccgattaacgcccgaatcggcacgccctgggcgcgaatcaaatcaataaccaatccgccaaccagttggctggccaccaataccgcaatggttgtcgccgcgcccacgttttgataaccgcttatgctggcgaagacgaaaaacgaacccagcaggccgggaatcagggtccaccatttgacgttgagcgccagttcctgaaagcctgccgcgccgtggcgcaggagtaagatagtgacaaaaagcaggatccccaccagcgaattcagcaacatggcgataagaatcgtcgaggcggattgggtaatgcggaccatcagggtgttttgcaataccagaccgacgcccgccgctatcaggcaggcaagggtgagcgactgattcatgcctcgccatccggatcctggcgatcgtcgagctgtagctgcataaaggtcagatccagccagcggccgaatttggttcccacatgcggcatctgtccgctggtgataaaaccaagtgattcatgcagatgtaacgaagcatggttgcaggattcaattccggccaccatcacatgtttacgcaggcgccgcgcctcagcaatgagcgcgaccagcagcttgcggccgattcccttaccctggtgatcggcatggacatacaccgaatgttcaacggtatggcggaaaccgtcaaaagcgcgccagtcgccgaacgaggagtacccggtgatggcgccgttttcttcactcaccagcaccggataaccggcaatctgccgggcctcaaaccaggcaatacggttatcgatatcgacggttttgtcattccagatggcagcggtatgcagcacggcgtgattatagatttcggcgatcgccgcgcaatcgtctttactggcatggcggatggacatagcaagcctcaaagtctgtacactatagtagtacgctattattacaataatgaacggcaggctgtcatcagttttacgataaattttacgcggaacgccgcaataccgggggagcggacagttgtgtaatacggtagtgcgcactatattgttacgccatgaatactatagaagacaatctcaaccagcgcattagcgcacgcattcgtatcgaacgcgagtcccgcggctggtcgctgagcgatctggctgaacgcgcaggggcctcgcgggcaatggtgcataaaattgaacgtggcgagagcagccccaccgcggcgatgctgggccgtctctccggcgcgtttggcatcagtatgtcgacgttaattgcgcgtgcagagatgcaggagggcaagcttttgcgctttgccaaccagccggtgtggcgcgatccacaaagccactatttgcgccgtcacgtctcgccgcgtagcgatctgccgatcgatctggtgcaaatagagttgccggccggcagcaatgtaccgatgccagcttcttcgtatgcgctagcacgacagctcatctggcttcagcagggtgagttagtttttgtagaagggaacactcgccatcagatgcaggcgggggattgtctggaactggggccgcccaacgattgccggtttatcaatgagtccagcgagacttgcgtctatctggtggtgcgcctgaaccaatccggctcataatgttaaagcgcgttaagcataaaacggctagcctcagtacaggccgttaacaagaggagtttgctatgaccgctaatccacaacgccatcaccgctgggtattggcttcacgcccgcacggtgaacctaccgccgaaaatttcagactggaagagggtgacctcccgacgccggggggaatcagatcctgctgcggactatttatttgtcactcgacccttatatgcgcggacggatgagcgatgcgccttcttattcgccgccggtggacattggcgcggtgatggtcgggggtacggtaagccgcgtggtgagctctaatcaccctgattttaaacccggtgagtgggtgcttggctatagtggctggcaggattatgcactttccgatggcagcgatctggttaagctcggcgacaaccctgagcatccttcctgggcactgggggtgctaggcatgccgggatttaccgcttatatggggctgctggatatcggccagccgaaagtgggggaaacgctggtggtggcggcggcaaccggcccggtgggggcaaccgtcgggcagatcggcaaacttaagggttgccgtaccgtcggcattgctggcggcgtcgagaagtgtcgttatgcggtagatattttaggcttcgatgtttgtcttgatcaccgtgctgcggatttcagccagcagttggcgcaggcatgtccgcagggaatcgatatttactatgaaaacgtcggcggtaaagtttttgatgcggttctgccgctgttgaataccgcggcgcgggttcccgtgtgcgggctggttagcggctataacgccaccgcactgcccgatggcccggatcggctgccgctgctgatggcgacgatccttaaaaaacgtattcgtatgcagggctttatcatcggccaggattacgggcatcgcatcgcggagttccagcagcaaatggggcgctgggtgcaagaaggtaaaatcaaataccgcgagcagcagattgacggcctggagaaggcgccgcaggcgctgattggcctgctgaagggagaaaacttcggcaaagtggtgattaacgtcgcagcggaggagtaacattaccgccttctctaacgcccccgaagacgcgtgcgggggcggtttcgtcgcctctaagcaaaaaaatgactaatccatacttttattaatggtttgcttttccgtgagcggctttttatccttaaggaaacttaagaggttaatgcgatgaaagatgtagttgataaatgcagtaccaaaggctgcgccattgatgttggcaccattatcgataacgaagactgcgtttaccgggtcgagaaacttttccctacccgtgaagaagcggagtccgcggtagcggccattcgcgaacgcgccgttgccgccgccagcgaaacgccgagcgtggattacactattgagccggtgggtaatgaggcgaaactggacgcggcggtgaatttctcctgccaggcggaaaaaattattttcgaattgtccttaagaagcgcgttctaacagaaggctgcggaataaaacagggatcccaattgggaaccctgtttttttatcattactcattgggtggcgtcatcattcgaaacgccaggcgagattcataccgataccgaagttacggcccggcgccggttcgtaataacgaccattggattcattgacaatcactgagcccacgtaattacgatcaaacaggttatcgacgcggccgaatagatccatatccattttcccgtagctccacttatagccggtggtcaggccaaccacggtccacgatggcgctttggctgtgttggcgtcgttggccataatgtcgcccatataacggatatcgctacccgcgtaccagccctgttccggttggtagccgaaagaggcatagcccatattgcgggcaatacccggaatacgattgccgttgcagtctgaggagccgcaaacgttcgtgcgataggtggcgtcgagccaggtccatgctgcttttaatttccagctgtcgccaaactgctggtcgaggccaagttccattccctgacgacgggttttaccggcgtttttatagctggtgcggccgccgctgctggagtcgaccacaatctcattgtcggtatcggtctggaacagcgcggcggtgaacagtccgttgcctatccgcgttttgctgccgatttccacggtttcatttgtggagggtttaagatcgaagtttaatccgctctgattgccagaacgatacgagagttcattgatcgtcggcgtttcaaaaccgcgtccggcggaaagatagatattccaggcatccgtgacggcatacttcaatgaaccggctggtagccatttgtggtagctggcatcgccgctatcatcgctgttacccggagtgacgtaatagtcgttagagtcaaaccaaacggaactgtagcggatgcctgcatcgaatgtgagcctgtcggtcagttgccactgagtctgcaggtatggatccaggttccacatcagattacgttcattacggcgcaggttgccctgttcgccgtattgcggcgcgccgttcaccagaacgtagttttcataacctttacgccgttcgctcatgttttcgtaatcaagaccggtggtaaagatcaccggcaccagtaattcgccgcggtgggtccagcgggtgtcgatcccctgataatggcgagttaaatcgatgacgcccccggaatgtgagggcttcagctgcggcgccatcgggattgactgatactgggtagtttcgcgctcgccggcatacatcatcacgctcagatcgtcctgctggctaagctggcgctcgtaacgtagcccggcctgggtctgtttcaccgttttacgcgtgttgtattgatcgccgcgcggcgactggcgcggattattctgccactcctcgtagctcaatccgcccgggtcgttagctttgatatccacgctattgaatagcaacgttaatttactgacgtcgtttatacgcacgcctaatttggcgttggcgagatttttacgcgcgccactgtggtcacgagaaccatgggtagtaaaacggttggtcgacaccgtgtaatcgacatcacctgcctgggtgccgtcgccgacggcgccggtggccttcagtccgtaatgccaggtgccgaagctgccgtagtagctgctggcctcgatggtcggcggctggctgccagtttgggtattgacgttaatgacgccgccggaagagttgccatagagcgcggaaaaaggtccgcgtaacacttccaggctatcgatgctgccgatatcgatattcgatgtctgcccctggccatcgggcatggtggcagggataccgtcaacgtatagccgcaggccacggacgccgtaggtggagcgggaaccgaaaccacgaatcgacagctgcaaatcctgagcatagttttgccggttttgtacctgcaaaccgggtaccgcgccgagcgattccgagaggttaattcgcggggcggcctgacgcatatcatcgccattcactacgctgacggcggcaggggtatccagttcggaaaccgcggtaggcgtcgccgtgacgaccatggtttgctcgtcgttcgtactggcgtgcacgctggcgacgagagggagtaataaagcggggagcgcgaccgtgcgcatggcaataatattcatcaaagcgactcgcaaagagaaacgtaccaaatggaacatatgtatatatgttacaccgtttgtaaattctttgaaaataattaactaaccggtcgttaagtaatggcaagtaaaggtgattcttttaaccaaaaaaggcaattaacgctccacattacgataaataatgattactattctcatttacaaaaagagtgaagttaaccttcacgctgtggaagccatctctaaccagtaattaattgttctataaagggaatcgttatgtcattacgtcagttatccgcgccgcgtctgcgtcgttctctgttattaacgtcgttactgttggcaggcagcttcagcgcccacgccgccgaggagctcctgcgcaaagcggtcggtaaaggcgcgtacgaaatggcgtatagccagcaggaaaatgcgctgtgggttgccacctcgcaaagccgttcgctggataaaggcggtatcgtctatcgtctggatccgaccacgctcgatatcacacaggttattcataacgacctgaaaccgttcggcgccaccatcaataacaccacccagacgttgtggtttggcaacaccgttgatagcagcgtgaccgcaatagatgccaaaaccagcgcggtgaaagggcgactggtgctcgatgaccgtaaacgtagtgataccgtgcgcccgctgcagccgcgtgagctggtggtgaatgagaaaaccaataccgtgtatatctccgggctgggtaaagagagcgtgatttgggtggtggatggcgacaagctgacgctgaaagataccattgccaataccggcgcgatggccaccgggctggcgctcgatgctgacgctaaacgtctttacaccaccaatgccgatggcgaactactgactatcgataccgatagcaataagatcctctcgcgcaagaagctgcaggatgatggtaaggagcatttctacctgaacctgagcctggatacagccggtcaccgtgccttcattaccgacagcaagcagcctgaagtgctggtggtggatattcgtgatggaaaagtgctgcaaaaaatcgccgcgccggaatccctggcggtactgtttaacccagcacgcaacgaagtctacgtcacgcatcgcaaagcgggtgaagtcagcgtgattgatgctaagacctataagatcgtcaaaacctttaaaacgccgaccttcccgaatagcctggcgctgtccgccgatggaaaaacgctgtttgttagcgtgaagcaggagtcaactcgtcagaaagaggccaccgcgccggacgatgttatccgcattgccctgtaatctctcaaggggggggggcgacccctccttactccgggtctcatcctctgttacaaaccgctattagcctgattactataaaggttatacacttactttttcccgcgcgcggcgggagagtggtaatcattctggagaaattatgaaaaagccatatatggtgatctgtgcggcggcaatgctggcgcttctggcaggctgtagctctaattacgtcatgacgacaaaaagcgggcaaactatcgtgacccacggtaaaccgcagttagatgaagaaaccggcatgaccagctatatcgatgagtctggcaacaaacgcgaaatcaacagcagcgacgttgctcagctggtggaagataattaattttgcgctgacggtttgcccgctgaggggcaaaccgttatggagaggtgcttagcgtttttcaacgcccggcgccgtgctgtgaacatcagccacacgtttacgtacgccgaaccagccagcaaccagcagcactgccagtagcggaatggaaccgatggtataggtgccgttcgggtagtcaaaagccatcaacaccagaacgctcagcaagaacaacagcgttagccacgaagtaaatggcgcgcccggcattttgaagcttacatccgcggcttttccttccttgatagccttacgcagacgcatctggcagattacgataaagccccatgaggcgataatccccagcgatgcgacgttaagcacgatctcaaatacctgcgacggtaccagatagttgaggaagacccccaccacatagaccgccagcgtcgcgaggatcccagcgtaagggacatgatggcggctcatctttgacataaacttcggcgctgaacctcccatcgacatcgaacgcagaatgcgcccggtgcaatacaggcctgagttcagactggagagggcggcagttaacacgacgatgttcatcacgctaccgatatacggtacgccgagcttcgagaagaaggtgacgaatgggctttgccctgcctgataggcgttccatggcagcagcagcaccaacagcacgacggaaccgacgtagaacaagccgatacgccagatcacgctgttaatcgccttcggtaccatggtttccgggtctttacattcgcctgccgcggtacccaccagctcgatggaagcgaaggcgaagacgacaccctgaaccagtaccagtgccggcaacagaccgtgcgggaagaaaccgccgttgtcggtaatcagatggaagccggtggcattgccatccagcggttttccggtaccgaggaaaatagtgccgacaaccaggaacgcgacgatagcgagtactttcaccaacgcgaaccagaactccatctcagcgaaccatttcacgccgatcatattcatggtgccgacgatcgccagcgcgccgagggcgaagacccactgcggaacatcgccgaaagcgccccaatagtgcatatacaaggcgacggcggtgatatcgacgataccggtcattgcccagttgacgaaatacatccagccggcgacgtaggcggctttttcaccgaggaattcacgagcgtaagagacgaaactaccgctggaggggcgatggagaaccagttcgccgagggcgcgaaggatgaagaaggagaagataccgcaaaccagataaaccagcgccagcgccgggccagccatttgtaaacgcgccccggcgccgagaaacagaccggtcccgatggcgccgccaatggcgatcatctgtacctgacggttgcccattgctttgtggtaacccgattcgtgcgagttgagccagtggcgtttcgcggcatgatgttccgccgcgtcagtgtgtttgttattcattgatgtacccattttcctgtcaatgtccatgagtggttgttgtatcgcgcagcggcgatacatcgtgctggctttctcaccattctgtcgtagagataaatcatgcacggcgctgcatcctacacgtaacgtgatagtgacgcacgtaaaacatttcacaacagcacttacttaaatatcaatgagttcaatgacgcaacgcgtcgacgagtagcgcaaacgcagcggtatgctgacggcggctggggtaatacagatgataaccagggaaggtgggtgtccaggcatcgagtacccgtactaaacgaccggtaaccagcgcctcctcgacgcaatcatccggcacataggccaggccgagaccggattcagcagcatcaatgcgttgcggcaaactattcagcgtcaattggccatctacataaacctgaaagcctttaccatcgtcggtgaattcccaggcgtaaatcccgccgcgggttggtagccgcatattaatacagcggtgctgatccagttgataaggagtctgcggggtgccgtagcgttgaagatagttgggcgagcccacgacgaccatgcgcatgtccggggcgatgcgcaccgcaatcatatcctttgccacctgttcgccgaggcgaacgccggcgtcaaagcggccatcgacgatatcggtcaggccgttatcgacggtaatttcgatattgatatcgggataacgcaacataaatggctttaatgccggccacaaaacctcgctgacggcgtgttcgccggcgttaaggcgaatattacccgccggaaggtcgcggctatccctcaaggcgctgagctcgcgttcaatttccgtgagatgcggacgtaaattctggaacaatttttcacccgcttcggtaggggcgacgctgcgggtggtacgggtcagcagacgaacatcaagccgtgcttcgaggttgcgcatcgcatggctcagcgcagattgcgataccccaagttgggcagcggcgcgggtgaaactgcgttcgcgggcgactaccataaacgacaggagatcgttgaagttatcctttaacatgctgttaccgtatttaatttagcgaattcatggcaggaaattgagtctaaacgcggtagacggctttcgccacaaggatccacgcagctgaagagagtatatgctgactatcgggagaaaaaggggcttgaaatcatcatgaaaatcaatgtggtaggcactagcggcgtagggaagtcgacacttgcgcaacgcctggcggcagcgctttctttgccctacatcgaactggataggctctactggcggccagagtgggagggggcgccggatgaagagtttttcgccagcatcgcgcaggcaacggcctctgctggctgggttctcgatggcaactataatcgcagtcgcgcagtcaaatggcgtgatattgatctggtggtatgggtagattatagctttgttcgcacactatatcaggccattcgccgtgcgctgactcgcgcctggcaccagcaggagctatggccgggtaccggtaatcgcgaaacctttcgtcgcaccttctgcaatcgtgattcgataattttgtggacaatgaaaacgtggcgctctaatcgtcagcgctatttagcggatatgcattctgcgcagtatggtcatatccgtttcgtccgtttacgtaaccagcgacaaacagagcgctttattgctgaaattgtccatcagcaggcaatggctggcagggtgcatatctaatttccggcagagtacatgtgaataaattgtttctcagcacgcgctgcagattctaataatgcaggcatgttaattaaaacgagcctgcgaaatgtcttatcgaatcagtatcctggataaaagcccccttgctcccggcgaaacggccgctcaggcgctggcgcgtacgttaacgcttgcgcaacaggcagaacgctggggatatcatcgtttctggattgccgagcatcacaacgcggaacagctggcgagcccgtcgccggagctgctgattgcctggatcctcgggcaaaccaggcagatccgcgtcggttccggcggcgtgatgctgcagcactatagcccctacaaagttgctgaaaacttcaatctgctcgccagtattgcgccaggccgcgtcgatattggggttggcaaagcgcctggtggtctgccgctcgccactcgtgcgctgcaacagggcattcatcagcatgagaagggcagttttgccgagcagcttacccaacttgataactggctaacattgaccgaaagccagggcgaggagagcctgcgcgcgaccccgattccgccgcgttgcgcggacggtttcctgctcggcgccagcgtcgagagcgcccgtctggcggccagtctggactggaacttcgtttttgccgcgcatctcaacggcgataaaaacttgttgcaggaggtgctgacgaactggcgcgaattgagccgccgcgaggtgattgtggccgttcaggttatcgttgcgcgagacgccgccagcgcggccgatctggcgaagcaggtggaggtctggggcgttgaactggcaaacggtcagcgggtaacggtgggcagcgaatctcaagcggcagctttcgcccgtcaggccggtagtccgccgacgcgcattgagcgccgcgaatcttcgctgttattcggtaccgcagacgaggttaaagcacaactcgatacgcttcaggcgcagtggggtattgatgagtttattattgatacccctgttgccgaagggcgtacacggctggcgtcgcttgggttgttggcgcaggcgcatcttggcgcggaggtaacgccatgaattttgaacaacagttgattagctggcggcgcgaactgcatcagaacccggaactctcattacaggaagtggcaaccaccgcgcgtatccgcgactggttgcaaagtggcggcctgccgttactgccttaccagttaaccaccggagcggtgacggaagtgggcagcggcgataaaatcatcgccctgcgcgccgatattgacgcgctaccgatagaagaggccaccggactgccgttccgctcgcaaaatcccggcgtcatgcatgcctgcggtcacgatatacataccagcgtgatgcttggcgcggcgttgctgttaaaggaacgagaagcgcaactgccggggcgggtgcggatcctgttccagccagcggaagagaatttcggtggcgctaaaacgctgatccgcgccggggcgcttgacggcgtatcggcaatcttcggcatgcacaatgagcccaatttacccatcggcgagtttgccacccgcggtggcccgttttatgccaacgtcgaccgcttcgtattcaaagtgaccggtaaaggggcgcatgccgcccgtccgcatgaaggaaaagacgccatcctgctggcgagccaactggtgacgctgctacagagcgtcgccagccgcgaagtgaataccctggattcggtggtgctcagcgtgacgcggatccaggggggaatacctggaacgtcttgccggaaagcgtagagctcgagggaacgttgcgcacccacagcagcgaggtgcagcagcgggttaaggcgagagtcagcgaaatcgccgccggtttcgccagcgcctttggcgcgcaaattgatgtcttctggtatgccgggccaacggcgctggtcaacgatgagcgctgggcggcgttcgccagcgcggtggccgaccgcttcggctaccgcacgcatcacgccgatttacatctgggcggcgaagactttgccgtctatctgcagcatattccgggcgctttcgtcagcataggtagcgccagtgaattcggcctgcatcatccggcctttaatccggatgaaaacgtcattgctccagccgcgcgctttttcgcggatctggcggaacaggcattacaccatatttgattttttgacaggggaaggggtcactatgtctgaaaaacggcaattacgcctggggacgattttacatggcgcctcaggaaatatgtccgcctggcgtcatccggcggcgctggcggatgccagtattaattttgaatttgtgaaagaaacggcgcaaaaagccgagcaggggaaactcgattttatttttgtcgccgacgggttatatattaacgaaaaatccatcccgcattttttaaaccgttttgaaccgttaacggtattatcaacgctggcggcggtaaccgatcgtctggggctggtcggcacgctttccacctcctatagtgaaccattcacgaccgcgcgacagttcgccagccttgaccatttaagtcacggacgcgccggctggaacgtggtgacgtcgccgctggaaggctcggcgaaaaacttctcccgcgcccagcatcccgatcatgcgctgcgctatcgcatcgccgacgaatatcttcaggtggttaaaggattatgggattcctgggaagacggcgcttttgtacgtaataaagagagcggccagttttttgataaaaataaactgcatacgcttaaccatcatggcgacttctttaaagtcgctggtcctttgaatattgcccgcacgccacagggacggccaattattttccaggccggcgcctccgatgacggcaaaaaattagccgctcgccacgctgatgccatttttactcaccaggaatcattagctgaggcgcaggcgttttatgaggatgtcaaaagccaactggctgcctatcagcgcagtgcggatcaactgcatattttccagggcgtcagcgttatcgtcggtgacgacacggaggatgcggagcgtcaataccagaccacggcggcgctggtctctattgacgacgcgttgaattacctggggcgttacttcgagcatcatgactttgcgcaatatccgctggatgaacccttcccggatattggcgaccttgggcaaaacagcttccgcagcaccaccgatgagattaaacgcaatgcccgtgaacggggattaaccctgcgcctggtggcgctggaggctgccagcccgcgcccgcgcttctccggcacggccagcgaggttgccgacggccttcagctgtggttcgaacaacgcgccgccgatggcttcattattcagggaggtaccccggaaaccttctcgcgtttcgttgatgaagtggtgcctttactgcaggcgcgcggattattccgccgcgactatccaggcaccacgctgcgtgaaagcctggggctagctctgcccattaaccaattcgaaaaataataaaagagaaccgcgctatgcagaaatcaacactattgctggccttcgcgttggcaattagcgccccgtcgtgggcgcaggacgtcaatatcaatggcaccggtgttagcctggaagccaataaaaccccgattcatacggcaaaaaatccgcaggcaattgcgctgttgccgaaagatctgcaccttgcggtgcccgggaaattcaccgtcgcggttgcggcgctgaactcgccgccgctgacggtgttttctgatgacaataaaacgttactcggtagcgaggcggatattgcgcgtctggtggctgacagtctcggcctcgaagtcaacgttgttccgacgtcgtgggaagactggccgctcggcgtcgcctccggcaaatatgatgccgcgatcagcaatattaccgtcaccaaagagcgcaaagagaagttcgatttcgccacttatcgtaaagattcgctgggcttttacgtcaaaagcaccagcccactgaacaagatcgataaagcggaagatattgccggactgaagattatcgtcggctccggcaccaatcaggaggcaatcttactggcatggaatgcggaaaacgttaagcgcgggcttaaaccgtttataccggtctacaccaaggatgacgccgcgcagactctggctctgcaaacgggccgcgccgacgcgttcttcggccctaatgtcattggcgcctggaaagcagcgctaaccggcaaaaccaagctggtgggtagcgtggacggcggttggccgaaggcggcgcatatcgcggtgacgctgaagaaaggcagcgggctggtcaatgccgtacaggcggcgctgaatggcgctatcgccagcggtgattacgccaaagtgctcaatcgctggggcgaaggcgtggagagcattcctcaatcggaaattaaccccgccgggttgggcgattaacaggaggcgctatgagcgaagcattccgtgatatctctccggacgcgccggagctacaaccgattattagcggcctgtttgccgagtacgccacccgttacggcgactatttttctcgtgatgcggaagtggagttaaccgaatggtatctgccgccgcaggggctgttcattgtgctggagcgtgacggcgaaataatcgccaccggcgcttacaagccgaaagagacgcacaccgcggaaattaagcggatctggacgcatcgtcggctgcgtcaacaggggctggctgccagggtcgtacaggaactggagcgccgggcggtgcgggcaggttatagccatatttttctcaccaccggttttcgccagccggaagcggtaaagctctatttaagccaggggtacgaagcacagtttgacctcactcgcgacccggaagagtacagccggccgccctatgacgggcggttgcggttcactaaagcgctggcggttagcgccctcagccacagcgcttaaggaggcattatgcaatcatctgaaacgatcaaagtggttccggctcgctacccgctgcgcgtcgccggggcggtagtggcgctgctggtgctggcggtagtcgtgcagtcggtcgcgttcaatccgcgctgggagtggggggtattcgcccgctggttctttgacccggtaatcctcgagggattggggcaaacgctgctgcttacgctacttggcacccttttgagcgtcatcttcggcggcctgttggcgctggcccgcttatcgtcgtcgtggttgctcagcagcctggcatgggggtatatctggctgtttcgttcgctgccgctcattgtggtgttgatcattctgtataacttctcttatctgtacgacagcttatcgttggggatccccttcaccggcgtgacctgggcgagctaccagactatcaacgtgctggggcagttttccacagcagtggtcggcctgacgctggtgcagagcgcctataccgctgaaattatccgcggaggctttttgggtgtggatcacgggcagtacgaggccgccgccgcgctgggacttcccacctggcgacgtacgctgcggatcattttaccccaagcgctgcgcaccattctgcctgcggggttcaatgaaattatcagcctggcaaaagggacggcgatggtttacgtgctggcgatgccagaattgttctacaccattcagatgatctataaccgcacccaggaagtgatcccgctactgatggttggcgccgcgtggtacctggtgattaccagcgtgctttctgcaattcagtaccttgtcgaacgcgccctggcgcgcagtgaacggcgctcggcggtgaacagcgtacgtaataatcgcgttaaccaaccggctcgtcagccgcaggaggccgtccatgctcaactctcgtaatggtcatatttcgataaccggggtcagtaaatactttggtcgtcataaagcgctggatgatgtctccctggagatagcgccgggaacggtgacggtgatcctgggcccttccggttcaggcaaatcgacgttgttgcgcaccattaaccatcttgaacgggtcgatgaagggtttatccagattgatggtgactatatcggctatcgccgtaaaggcgacaagctgtacgagctgaaagaaaaagagattctgcgccagcgggttaacgtgggctacgtatttcagaacttcaatttgttcccgcatctgacggtgctggagaatctgattgaagcgccgattgcccacaaacaggccagtcggaaagaggcgattgctcgtgcgtatgaattgttggacattgtcggcttgcgcaacaaagcagatgcgtggtcgcggcatctttccggcggccagcagcagcgcatcgctatcgcccgtgctttggcgctcaatccgcgggtgattttgtttgatgaacctacctccgcgctggatccagaactggttggtgaagtgcttgatgtcattaaaaaacttgcccgctccggaacgacgctcgtggtggtaacgcatgaaatcggctttgcccgcgaggtagccgaccaggtggtgtttatggtcgatggcaaaatcgttgaacagggcagcagtgatgcggtgttaaatcatccacaacatcagcgcacccggcaatttttatcgcgggtgctggcatgagaaaattagctgtcgctctcttactgctgctgagcatcggcgaggcgcgcgccgaactcgatttgcgcgccaatgaacggccattgccgatgacgcgagatgataacgcgattagcaaaatcccgccgaactatcgttttgtggaacccggtgtgctgacggtggcgatttcggcgttaaattcgccgccgctggcgctgctggccagcgacaaccgcacgcgtatcggcagcgacccggacattgcccgtttgctggcgggcagtcttggtctgaaactgaagctggtgccaacggcttgggaggattggcctttggggatcgcgtcagggcgttacgatgtggcgctgattaacatcgcggtgaccgagaagcgcaaagagaagttcgatttcgccacctaccgcatagactcgctggccttttcggtgaaatcaaccagtgagattacgcggatttcaaatgcgcaggatctctcggggcgtaaagtcattgtcggttctggcaccaaccaggagtggatcctgctcgggtggaatgcggaaaacgaagccgcgggacggcagccggcgctaccggtttatcttactgacgatgcctcaggcaatctttatattcagtcgggaagggcggatgtcttttttggtccgcaatcggtcgcctcttataaggctgcattaaacggacaaaccaaagtcgtcgggctgggtcccaaaaaagcttgggtggcgaccaccactaaaaaaggcaatgggctggtatacgcgctgcaggcggcgctgaacggcgcgattgctcgcggcgaatatcagcaggtgctcgctcgttgggggaacaggggaggaagtcaggcaatcggaggttaatccgccgggttaacctattgatgcaataattattatagccaggggattgctatactcatggctacatcatgggtcttattaatggattaagcactgtggctgaaaaccaacttttacttgagcaacgctggcagcaccatcgtgaacccgcgttgctcgccgcttccggcggcgctatcgacaccatcagctttatcaccttgtttggcctgtttaccgcccacgtcacgggaaacctggtggtggccgggcagccctggccaccaacagcgaaggtattttatctaaactgctcgccattcctgtttttatgctggcggtggcaatcgttacgctggttatcaaacgtcgaaaaattatcacgccgcgcttccttggcggcttgttcgttgtcgaaatcctgctgttgctgcttttcggcctgttggggctgctgtggcagccgtttatcggcgcggatagcgtgaccgcgttaatcaccggaatggcaggcgtaatggcgatggggtgaggaatgcaaccacccgtttattattacccgcaaccagcccgagtacgatgatgaccggcaacgtcacgcaattaaccatcgatgtggtgaactggtgccaggcgcccaaccgcgagaatagagtgaaaatcaaaaaatcgggggcttcggtgctcggttttctgctgggagcagggcttggggcgctgggctttatcctggcgggcttctactcggtgcttattccggtggtactggtggccattgtcgcctggcgcgaattcagcgccgcgcggaattagtgctacgctaaaagttttctacgtggagcctgacgatgatgaaattgtatggcgtgccggggtggggctcggcgataagcgagatgatgttaacgttggccgacatcccttatcaatttatcaatgtcgatggctttgaccagccaggcgcgcagcgggagaaactgttggcgattaaccctttgtgtcaggttcccaccctgctgctggttgatggcagcataatgacggagaccgcggcgatagcgctgatgatcctcgacaagcgcccggatctggcgccgccatctgatactgcacaacgccagcagtttcaacgtttgcttatctggctggtggctaacgtttatcctaccttcacctacgccgactatcccgaacgctggacgctctcagcgcctgacgaactgcgtgagagctgtcagcaataccgcaaatcactctatctatggctggaacaacagctgactgccgcgccttacgccttaggcggggatatcacgctgttggattgctatattgcggcgatgtacagctgggggccgcgccgagagtggttcgtagcgaatacgccaaagtttgccgccgtggcgcaggcggtatatcgccgtacggaactgcagcaggtactgcgtgacaacaatcttctttaaagcactaattgtgacctgaatcagggaacctgtgatagttttaaattcccaataataaggagcctgctatgccacatgtcgatatcaaatgttttccccgtgaactgagcgaagagcaaaaaagcgcgctggctgcggaaatcactgaagttctgatccgccatctcagcaccaaggacagttcagttagcgttgcgctcaatcaggtgcagcagagtgattggcagcaggtatgggatggtgaaatcgcgccgcagatggatcatttgattaagaagccgggataccgaatgtaaaagaccagcctccgttagcgcattttcgtcacgctaaatagactaccatcggtcgaggtcaattttactttagcgaaagatatgccgctttattgatcttgatcaataaaagtggcttttttttgatttccatacctttcattaatttaccttttgtaaagcaattggccatttaagaataatcctaatcaacataaataactgataatattaagatatatagtttattacgctctgtatgtatttaaatgtagttttatgttttgattattatgcatatcaaaattgtttaggcgattgctgatttgccatgtaacctgcctttgaaatgatgatttttatcatggagagatgaatgataataggtagtgcgttacttggttaccaattagaggatgattttttttacttcttgaagtaccgggaaatagctactataagtggtaatagaaaaaacatccgtctacgaaaaacgatggcctgtctaattgaatatctctttgcgcatggtcttgaaagaattgttagtgatgaagagttgatggtgcatgtctgggagaaaaatgatttaaggccttcatcacaacgtttatggcaagtgatgcaaaatttacgtcgaatcctgaaggatgccggcattgagcaagatattatattacgcgttaagactcagggttattatatcaatagtcactacgtcacgactatttattcagtgaaaagtcataaatcattctgccagaatgatgacgcgaccgttcagttttgtgagatatccgagctaaattattagccattgggtctcctgtattcaaggtatgcctgtcgttttcatgctaaggttataaaattgaaggttataattaatagtaaggatatttggttccgattgggcgtggaatactgtctgcaacagatagcttctgactataatgagatcgattacgctgagttgggttattgcaaacaatctatccgggaagcggatctcattatattaccgttacatggctatcaagattacaagcatatctacgcgttgtctcaattttatcagggcattattctggggtgagtacgtccagaaacgttcactcacggcggattttatttagccaaaatattttatggatcagcagtcgtgaaacgatagacaatgttcaaaagttattgttaacgatcaaacatcggcaattatatcatcatgatggtcaaccagatttcagtgtaatgaaggcaaaggatggggttcctctcagcgaaagagaaatgatgattattgatcatgtcgctgcaggcactccggtgaacgccattgccagagcgttgggattgcgggtaaaaaccatttatgcgcatttagataaaattaaagctaacttcaaccttaaaggcggaagtcattttcatcgctttatgataagaccgccgtcttatcatttactataaaagatggtcaaagggaatgacggcagggttgccgtcattttgttaattatgcggcgtattcgcctgcacgggacggccgctggcgacaaaattaccggtaccgagatggtgaatagtattgagtttgtcatcatcaaactgccaacgcccgctgacgaaggctcgctcatcggccgcggcggcaaccacttcgccaaacagcgtatcgtattgctcttgtgccgcggtggcgggtagcagacggcattccatccaggccaggcatttctcttcaattaacggtagccccagttcgggcccattcaccaccgggataccgtaagcattgaacttatcttcatcgcgcccgctcacgctgccgaccgcatagacccaactggcggcggcaacgcccggcaccacaatgccaaaggcgccgttacgctcaatgatctcccgcgtccaggtacttttatccaccacaatagccactcgcggcggggcaaactcaaccggcatcgaccaggcggcagacatcacgttacggcgtccggattgcgcatcataactggtgatcataatggtcgggccgtggttgagcaggcggctggcgtactgaagttcgacgtggcgaaaacggctcataagcgttccttggtgagtgggcgaatgcctgtaagtagtttattcacaatacaaaggtaatcaatacgtcaaccgcgacgtaaatcagatatcagctgccgcgatcgcacaaaatacgccgtcgcgtagcaaaaatacgctataaatgtcggacaccaaaagctggaggcgttgatgaccccatttttaagcgcgtattttactcgtctggcctggacgggaacccccgatgtttccattgacaccctgcgggagttgcatagccatcataatagcgcgatcccgtttgaaaacctggacgttctgctaccgcgtgaaatccaccttgacgatcgcgcgctggaagagaagttaatcaccgcccgccgcggcggctactgctttgaacagaacgggctgttgcagcgggctctaagcgagatcggtttctcggttcgtagcctgttgggccgcgtggtgctggcgaatccgccgcagatgccgccgcgcacccatcgcttgctgctggtggaggtcgaaggcgaacgctggattgctgatgtcggctttggggggcaaaccctgaccgcgccgattaagctgctggccgatattccgcagcatacgccgcatggtgtttaccgcctggtgcatgaaggcgatgagtggacgctgcagtttaatcatcatgaacactggcagtcgatgtaccatttcgatctggggcgacaatatgcctctgattatgtgatgggtaacttctggtcggcgcactggccgcagtcccatttccgccatcatctgctgatgtgtcgtcatctgccggacggcgggaaaatgacgctaaccaatttccattttacccactgggacaaaaaccacgtggtggagaaggtggatctcccggatgtaccggcgctgtatgaggcgctgcaaacccgttttgggcttggtgtagatgacccgaagcacggcttcagcgaggccgcgctggcggcagtgatggcggcattcgatacccatcccgaagccgggaagtaacgctgatgacgacggcgaagaaagcactttgtcgtcgtcgtatgccggataaggcgtaaaggctggagccagggccgataaatattacccggagtcggcgcgagcgcctcgtccgggcggcatggctggggccgccagcgctcagcgccgggagcgcaccacctggtagcggcgggtaaaatactctatcggcgcgctccagacgtgaaccagccgggtgaacgggaagataaggaagatagtcattcccagcaccagatgtacgcgatacacccacgccacgccgtccagatgcgccgatgcgccgccgtggaaggtgactaccgcctgcgcccaatctactagtttgagcatttcgctgccgtccggatgctgggcggagaacggtatggtcgtcagccccagcgcgcactgaatcagcagaatgcacaggatcaggatatccgcagtggtggaggtggcgcgaatgcgcgggttggtcagacggcgcgccagcaggccaatgccgccgaccagggtcagcacgccgcagacgccgcccagcaccatcgccatcacctgtttctgcgacatcggcaggaaccaggaataaacccagtgcggggtcagcatcccgaagaagtggccgaagaagatgccgaggatgccgatatggaataagttcgaccacagcaccattccccgtttatcgagcatctggctggatgacgcgcgccaggtatactgcccgtaatcatagcgtaaccaactgcccaccaggaacacggtgccgcagagataagggtagatatcgtaaaagaagatgtttaagtactgtatcatttcgggcctccggcacggatgtcgacgtactgcggcgccacatcctggctaaagcgtcgttgataagcttgcattggcgagctatcgcaagcggttgcattatcttcaataaatttcacctgttcctcttcccacactgcatccagcgcctggcgcgtgtcgtcacgtttttcattggctacctgccttgtgacactgtcactattgagtgggctatccgccagcgtgagaagggtgtcaaagagttgatagtaatcgcattcgcgctgttttaagcgtccaccgagcaacgccagaatgggcgcgacgttttgcagaccttcacgggcatcggccaatgggagaatgctgagatattcaagatataaaggcaggtggtccggtagttcgcgacaatcgatctgcagacccgcctgttcatactggttcatcagattgaccatcgcctggccgcgatcgcgcgattcggcgtgaacgtgttcaaatagcaacagcgacgtggcgcgaccgcgctcaaacacctcacaccattcggcctgtcggtcgagcagcggcgccgccagtaatcgcgtaacaaacggcgtcagggcgggcgcatcggcgctgaccagcgccagcgcctcctcgcggttatcccacagcgcttcgtcgggatactccagcagtaaagcgatgactttgaggagccgcattactctccctccccatgtcgacgaatgtctccaacatcaatcgcgtcgatgcgacgactgttgaacaggttgaatttagtatcagaaccgtggcaaccatcgccgaaggtaaaaccgcagccgttgcgttcagggaaggcgtcttccgccagttcgcggtggctggtggggatcacgaatcggtcttcgtaattggcgatcgccaggtagcgatacatctcttccacctgctcgacgctgaggcccacttcttcaatggcgcgggtgtcggtcacgccttcgacggtttgtgaacgtttgtaatggcgcatcgccatcattcgttttaacgcgcgcaataccgggccggtatcgccggcgctcagcaggttcgccagatactgtaccggtatacgcaggctttctaccgccggcaggatgttaccgttactcggcaggccgccagcgtccgcgaccgactgaatcggcgacagcggcggcacgtaccagaccatcggtaaggtgcggtattccgggtgcagaggtaacgccagcttccagtccatcgccagtttatacaccggtgatttctgcgcggcttcaatcacgttatgtggaatcccctgtttcaacgcctcttcgataaccgccggatcgttagggttaaggaacacatcacactggcgctcgtagaggtcggtttcatgctcggtgctggccgcttcttcgatgcgatccgcgtcgtacagcaacacgccaagatagcgtatccggccgacacaggtttcggaacataccgtcggttgcccggactcaatgcgcggatagcagaagatgcatttttccgatttgccgctcttccagttaaagtagatttttttgtacggacaaccgctgatgcacatccgccagccgcggcatttatcctggtcgatcagcacgatgccgtcttcttcgcgcttgtagatggcgccgcttgggcaggtcgccacgcagctcggattgaggcaatgttcgcaaagacgtggcagatacatcatgaaggtgttttcaaactggccgtacatctctttttgcatcgcttcgaagttgcggtctttggcacgtttttcaaactcgccgccgagcagttcctcccagtttggcccccaggtgatcttatccatccgttcgccgctaatcagcgaacgcgggcgggcagtaggcaaatatttgccttccggcgcgttgtgcaggtgctgataatcgtaggtaaagggttcgtaataatcgtcaatctgcggcagcaccgggttggcgaaaatcttcgacaacacgctgacgcggttgcccagacgcggagtaagcttgccgctgataccgcggatccagccgccttgccactcgtcctgatcttcccagtttttggggtaaccgataccaggcttggtttccacgttgttgaaccacgcatattccatcccttcacggctgctccagacgtttttacaggtgacggagcaggtatggcaaccgatgcatttatccagattcagcaccattccgacttgtgaacgtattttcatttcttcgtctcctgtacctggtcgcgaccttcgccatccagccagtcaatgtttttcattttgcggatcataatgaactcgtcgcggttggagccgacggtgccgtagtagttaaatccataagccagttgggcgtagccgccaatcatatgcgtgggttttggacagacgcgggtgacggagttgtggatgccgccccggcgaccggtcacctccgaactgggaatattcataatgcgttcctgagcgtgatacatcatggtcatgcccggcggcacgcgctggctcaccaccgcacgcgcggtgagggcgccgttggcgttgaaggcttcgatccagtcgttatcttcaatccccagttctttagcgtcagtttcgcttagccagacgatgggcccgccgcgcgacaacgtcagcatcagcaggttttcgctataggtcgagtggataccccatttctggtgcggggtcaggaagttcagcgctttttccgggaagccgtttggcggcacgtccttcatctggctgacgctgcgcgtatcgatcggtgggcgataagccaccagactctcgccgaaggcacgcatccagggatgatcctgatacagctgttgccgcccggagagggtgcgccacgggatcagttcgtgaacgttggtataaccggcgttataggagacatgttcgctttccagaccagaccacgttgggctggagatgatcttgcgcggctgcgcctgaatatcgcggaagcggattttctcatcctctttattcagcgccagatgagtgtggtcgcggccggtaaattctcccagcgcttgccaggctttcaccgccacctggccgttggtttccggcgccaggcttaagatgacttcactggcatcgatagcgctgtcgatacgcggacggcctttggccggaccgtcgggtttgacgtagttgagtttaccgaggaagtcgacctcgctttgcgtattccaggaaatgcctttaccgccgttgccgagcttatcgagtaacggccccagcgaggtgaagcgttcccaggtggccgggtagtcacgttcaaccagcgcaattgacggcgcggttttgcctggaatgagttcgcattcgcccttgcgccagtcgaggacatcgaacggctgtgacagctccgccggagagtcatgctgcagcggtaccagtaccacatcggtctctttatcaaggtggccgacgcacacttcagagaaacttttggcaatgtccttgtagatctcccagtcgcttttcgcctcccaggccgggtcgacggcggcggaaagcgggtggataaacgggtgcatatccgaagtgttcatatcgtctttttcgtaccaggtggcggtcggcaggacgatatcggagaacaggcaggtactggacatgcggaaatcgagggtcaccagtagatcaagtttgccctcaatcgccgcggtctgccactcgacttcctccggcttcacgtcagcggtggagccaaactcctcgccctgaataccgttatcggtaccgagcaggtacttgagcatgtactcatggcccttaccggacgatcccagcaggttagaacgccagataaacaggttgcgcgggtggttgttgccgctatccggctgctcggcggcaaagcgaatatcgcctgattttaacgactggacggtgaactcagcgggggacagcccggctgcgtcggcctgctgcttgatgctcagcgggttaacgttaagttgcggcgcggagggcagccagcccatgcgctcggcgcgaacgttgaagtcgatcatatggccgctgaatttgctggcgtcggccagcggagacagcagctcctgagcggtcagtttttcgtagcgccactggctggcatggttgtagaaataagaggtactgttcatctgccgcggcggacgagtccagtccagcgcgaacgccagcggcagccagccggtctgcgggcgcagtttctcctggccgacatagtgcgaccagccgccgccgctctgaccgacgcagccgcagaacaccagcatgttgatcatcccgcggtagttcatatccatgtggtaccagtggttcacaccggcgccaaggataatcatcgaacggccatgggttttatgcgccgtatcggcgaactcgcgggcgatttgttcgatatggtgacgcggcacgccggtgatctgttcggcccatgccggggtataggctttgacatccgcgaagtcgcgcgcggcattggcatcgtcaaggccgcgatccagaccgtagttagccagcaccagatcatacacgctcaccaccagactgctgtcaccactggctagcggcagctgtttagctggcagctgatgaagcgttaccggctcctgcttcacgctgcgaaaatgcgggttttcgttgccgccgaagtaggggaaaccgaccgacaccacgctatcgtgcatacccagcagcgatagttttaatgcgacgtcccgaccgtttgcccgttgttcaagattccatttacctttttcgccccaacgaaagccgatggatccattcggcgcgaccagttcgccatcggcgttataggcgacggttttccattccgggttattactttctcccagcccgtcaagcaggtcggcggcgcgcaacatacggccaggcgcatagctgccgtcatcacgacggtcgagcatcaccagcatcggcatatcggtataggtacggcagtagtcgagaaaataatcgcttgggttatcgaggtggaaggttttgaggatcacgtggcccatcgccatcgccagcgcgctgtcggtaccttgcttcggcgccagccactggtcgcaaagcttggcgacttccgaatagtccggagtaatggcgatggttttggtgcctttgtagcgcacttcggtgaaaaagtgggcgtccggggttcgggtctgcgggacgtttgaaccccaggcaataatgtagctggagttgtaccagtcggcggattccggcacgtcagtctgttcgccccaggtcatcggcgaggcggggggtaaatcgcagtaccagtcatagaagctcaggcaggtgccgccgagcagcgataaataacgggtgcccgcggcgtaggaaaccatcgacatcgccgggatcggtgaaaagcctgcgacgcgatccggaccgtagtttttgatggtccagacgttggccgcggcgatcagttgattgagctctttccaactggagcgaacaaagccgcctttaccgcgaacttgtttgtagctacgggttttcagcgggtcctgcatgatgctatcccaggcctgtaccgggtcgggatattgtgccagggcttcgcgccacagctcaatcagccgtttacgcgccagcgggtacttcaggcggttggcgctgtagagataccaggagtagctggcgccgcgcggacagccgcgcggttcgtgatttggcaggtctggtcgggtgcgcggataatcggtctgctgggtttcccaggtgaccaggccgtttttgacataaattttccagctacaggagccggtacagttcacaccgtgcgtggagcggacaattttgtcgaattgccagcgttgccggtagctatcttcccagtcacggttattgtcgtagacctgaccgtggccgttggcaaaggtctcgcgtttctgcttaaagtagcgaaagcgatccagtaatttactcatgacatttctcctgctccgctaatgtccggcatcgtgccatccggtaaataggtcgttatggttgcgcaggtttacggcggccgtagaccagccaggtcaccagcacgcaaaccacatagaagacaaaaaagactttcatcgcgcccacaggcgagccggtcatggccagtgaggtcccgaaggcttttggaatgaagaaaccgccgatggcgccgattgcagcgataaaaccgagcgcggcggcggtatcggtcaccgcttcgtgctgggcctgttcgtcgctgccgccgcgctttttcacgctatcgatggtgagctggcggaagatcacggcgatcatctggaaggtggagccgctgccgagaccggcggttaagaacaggcccataaacaccacgtagaaggcgaggaaactaccggaaccggaaccgggtagagtgaggaaaagcaggccggtaaagaccgccattagaatgaagttgaccagcgtcacccgtacgccgcccagacggtcggaaatgatgccgccgaaggagcgcgccagcgcgccgataaacgggccgaagaaggccagtttcaggatatcgacatccggaaactgggttttcgccagcatcgcgaagccggcggagaaaccaataaacgagccgaaggtcgccagatacagcaggcttaacagccacatatgcggacgcttcaataccggtaactgatcgcgaatcgaggctttggaactggcaatatcgttcatgccgaaccacgcgaaaacggtggcgataaccagtagcggcacccacagcagcggtgaattgccgagccacaacatggcgccgccaggttgctcaacgccgcgtacgccaaggaaggtaaaaatcggcagaaagataaaaataggggagaccagttgcatcacgctgaccccaagattgccgagcccgccgttaatccctaacgcgctgccttgtttggccttggggaagaagaagctgatattgcccatactggaggcgaagttggccccggcaaaaccgcagagtaacgaaatagcgataaatacccagtatggggtagttggattttgtactgccaaacccagccataaacaaggaatcaccagaataactgtgctaataaccgtccagtagcgcccacccataataggtaccataaaggagtagggtacgcgtaatattgcgccggaaagcgaaggtagcgccgttaataaaagagctggtcagtagtgaaattaaaacccactttattgagattgaccgcaaccgcgctaaataacatccagacgcagaaggcaagtaacagacagaatacggaaatccataagttcctgcgtgcaatcgcttttcctttattttcccagaaggcttcattttctggtcgccaatcctttaagagataatgattctttttatcaccttctatcgacataacaccctcactaaagcgtacgagatcaaaaggataaataaaaaacagctgaaactatgcaggctggaattaagcttcagctgtttttaataattgtattgtttgaggatagataagaatcgaggcgtgaaagaattcacgccgacaatgaagggcggtcaattgttactaaatgtaacttaagcttgagggagttccagcgcgatataatgttttaagtaacgggtaaatgccgcatcgtcaatcgcttgcatcccaagcgcgtatatgccatccagcccgcaaaccagggcaatcagacgccaggcgatattctcagccgtatcctgcggctgaaattcaccggcttcggcgccgcggttaatcgccgttaccgtttcatcatgccacatactcatggtaagcagatacgcggccttaatttcctcatcgctatcggacaaaatctgcgcttcccgccacaggcggatatagggctcgagacggccatcttcgctgccaagtaatgaaaacaggcgttcgctccaggaggcgtcatcggtcagcagttgaatatcgagcatttcgcggatcaaacggataaaggcctgcgctttcagctcgccggtcgaggtaaaatgatgatgtaactgacctgcggcgacgccggcttcgctggctatctggcgcacggtcatggcgctgaacccgccatttagcgccacttgcatggcggcctgcatgataacttcccgacgcgcttcccgatttaaatagtgcatagcgacccgtaaccaagaggtgatgggatgatggtaacaaaaagttggacagacgttcaacaatccggcaggatcgcaattctggacgcgtgtccaatttaataaattgaggaaaagtagtatgtctcggcaatggttaacgctgatggcgattttgctggtatatatcccggtggcaattgacgcaacggtgctgcatgtggccgccccgacgctcagcgtcgcgcttggcaccagcggcaatgagctactgtggatcattgatatctattcgttggtgatggccggtatggtgctgccgatgggcgcattgggcgataaaatcggctttaagcgcttgttgctgctcggtagcgctatttttggtgtcgcttcgctgtgcgccgcgctgtcgccgtcggcgataacgctgattatctcccgggcgctgctggcggttggcgcggcgatgattgtgccggcgacgcttgccgggatccgcggcactttcgccaaagccagccaacgtaacatggcgctgggattatgggctgcggtgggctccggcggtgcggcatttggcccgctggtgggcggcatgctgctggaacacttctactggggatcggtgttcctgatcaacgtgccaatcgtgctggtggtcatcgccatcaacgctaaggttgtgccccgtcagcccgcacgccgcgagcagccgctgaatctgccgcaggcgctgatcctgattgcggccattctgatgctggtatttagcgctaagtcagcgttaaagggacaactggcgctgtggctgattgcgctggtggccatcggcggcgcggctatgctgacctggttcgtccgcaagcagctgtcgatgacgacgccgatggtggatatgcgtctcttcacccaccgcattattttgagcggggtgatgatggcgatgaccgcgctcattacgctggtcggttttgaattgctgatggcgcaggagctgcagttcgtgcatcagaaaacaccgtttgaggccgggctgtttatgctaccggtgatggtcgccagcggctttagcgggccgattgccggaatgctggtgtcgaaactggggctgcggcaggtggcgaccggcggtatgttgctgagcgcgttgagtttcctgggtctgtcgatgaccgacttcagcacccaacagtggcaggcgtgggggttaatgacgctgctgggctttagcgccgccagcgcgctgctggcgtcaacgtcggcgatcatggcggcggcgcctaaagaaaaggcctccgcggcaggcgccattgaaaccatggcctatgaactgggcgcggggctgggaattgcgctgttcggcctgatccttacccgtagctacagttcggcgattgagctgccttccgggattggcggtgaagcagcggtacaggcctcatcgtccatcggcgaggcgatgaaggtggcgcaatcgctacccgcgatacctgcagattcactgattgcggcggcgaaaaccgcattcatcagcgctcacagcatttcgctggcgacggctggcgttctgctgttgttgctggcgctggggatctggcgtgggctggcgaatacgccggcgccacagtaatgtcatagctgaagagaaagctccatcgccgcgcgacgcagcggcgcgagggctttctccttcagcgccgcggcgctcatcgaagaggcggggacgccaacgttgagggccgccaccacctggccgctgcgcgacagcagcggtaccgcaagcgagcataatccaacttcaatttgcctgtccgccagcgcatagccctgcatgcgaactttagctatttccgcgcgtaatgccgtggggtcgcacagggtatgcggggtgtagcgcataagatgtgcgcgtgacaacgtcacttcaagttgttcttctggcagcgcgctcagcaatacccgtcccattgaagtcgtccatgccgggaggcgactgccgcgccccagatcgacgctcagtaagttattgaccgccgcgcgggcaatgtacagcacgttgtcgccatcaagcgtggcggcggagcagctttctcctaacgccttaccaagattatccagcgccgtttgcgccactttcgccagcggggttcccgccagataggcgtggcccacggccagtacgcgcggtagtagttcatagctgcggccgtccgggctgtgcaccatccccagcgccgccagggtatacaggcagcggcgcaccgccgcgcgggaaatttgcgttttttgacttaactgcgaaatggtcagccgctggcgctgcggagtaaaagcattgagcacttccagcccgcgggcgagagacagcataaaattggggtcgtgctcggcctgcctggcgctcagcgtagtgtgggtattgtcgctcattgcatctttctccgttgcaacgtaaagctcacggggaatcactataccgcgcgcaaaccagggcgcgccgaattgtgcctgttttaccacctcgatcacattattaaccgcaatttaacaagcgtgccgataatcgcacaacatttcgattatcgccgttgaccatccgccaggctggaccctattgtcaaagcacagacatccccgttatggatgtgggtacaaaaagttatgcatctttcaggaacaaaaaatgactgcgaccgtagaacgcattgagagttggttagtggatgtaccgaccatccggccacataaattatcgatgaccaccatgggctgccagacgttggtcatcgtgcgaattacccgttccgatggcgtttgcggtatcggtgaagcgacgaccatcggcggactgagctacggcgtcgagagcccggaggccatcgcatcggccttgacccactatttgacgccgctgctgaaagggcagccggccgataatctgaatgcgctgacggcgcgtatgaacagcgccattaaaggcaatactttcgcaaagtctgccattgaaactgcgctgctggacgcccagggcaaagccttaggtttaccggtatcggcgctacttggcggcgcgctgcaagcgtcgttgccggtgctgtggactttagccagcggcgacaccgcgaaagatattgccgaaggggaaaagctgttatccgagcgccgccatcaggcgttcaagttgaaaattggcgcacgggaattagccaccgatctccgccatacccgcgccattgtcgaagctttaggcgatcgcgccagcattcgcgttgacgttaaccaggcctgggatgccgccaccggcgcgaaaggctgccgcgagctggcggcgatgggggtcgatctcatcgaacagccggtgagcgcgcaggataacgctgcgctggtgcgcctgagccagcaaatcgagaccgcagttctggcggatgaagcggtcgcgaccgcttacgatggttaccaactggcgcaacagggatttaccggcgcttacgcgctgaaaatcgccaaggcgggcgggccgaatagcgtgctggcgctggcacgcgttgcgcaggcggcggggattggtctgtatggcggcacgatgctggaagggaccgtggggaccgtcgcttctctgcatgcctggtcgacattgccgctgcagtggggcaccgagatgttcggcccgctgctactcaaagacgatatcgtcagcgtaccgctgacctttgccgacggtcaggtggtgttgccgcaaacgccagggctcggggtggagctggatgaagacaagctgcgcttctattcccgtaaagcataacaggagaaaataatgctatttaaagttgatatgaccgttaatattccgatcggttttcctgccgccgaggcggatgaaattaaacaacgcgaaaaagcttattcgcaacaattacaacgtgaaggcaagtggcgacatatctggcgcgtcgccggtctttacgccaatgtcagcattttcgatgtaaaagatgccgaagagttgcatcaaattttaatgggattgccgctgtatccatttatggatattcgcgtagaggcgctgtgccgtcatccctcgtctattcgtgaagacgatagctaataataataacgtcgacctcatgccggggcacccggcaaatatcctacaacgataagagagaataattatgagtaatgctttcgtacaacaagaagccgtgcagaaattattacgtgaaggcgcggggttaaatgttcctggcggcaacgaacgctttaaagccattgtccaccgtttactggaaaatatctgcacgctgatcgatgactataacgtcacagaagaagagttctggcacgcggtaaactatttgcatgagctgggtgggcgccaggaagcggcgctgctggcggcgggtcttggtcttgagcacttcctcgacctgcgtcaggacgctatcgacgcggcggcgcatcgtgaaaccggtaccccgcgcaccatcgaagggccgctgtatgtagccaatgccccgctggccgacagccatgcccgcatggatgatggcaccgatgccggcgaagtgatgtggctgcacggtcaggttaaagataatcagggccagccgattgctaacgccatcgttgatatctggcacgccaataccctgggtaactactcgttcttcgatcaaagccagagcgactacaacctgcgtcgccgtattcggaccggtgccgatggccgctatagcgtgcgcagcatcatgccatccggctacggctgcccgccggatggtccaactcagaagttgctggaccagttaggccgccacggtaaccgtccggcgcacattcacttcttcgtctccgcgccgggccataagcatctgaccagccagatcaacctcagcggcgacaaatacctgtgggatgattttgcttttgccacccgcgatggtctgattgccgacccggtgaaagtgagcgaccgcgagacgattgcacagcgtgaactggacggcgagcataccgaagtgcgctttgatttcaccctctgtaaagcgctgagccccgacgaagagcaccgcggcactcgtctgcgcgccaaagagtaatctgctttagcggcccggtcacgctgctggcccgggccgcgctctgcacccgatagtcaccacattcgccaaatatctttaatcctgaatcctgcaggaggagttaactcatgcaaaaaacgctatcagcgcttaaagacaaaattaacaacgcgttaattgtcgaccgtgaaaatcatatttaccgttgccaccgctctatatttaccgaccagcagttatttgattttgaaatgaaacatatcttcgaaggaaattgggtttttcttgcccatgaaagccagattgccgagccgggagattattataccctgacgctgggacggcagccggttattattacccgtgataaaaagaatgaattgcatgcattaattaatagctgcgcccaccgcggcgccatgttatgccgacgcaaaaccgggaataaaaattctttcacctgtccgttccacggctggactttcagcaataacggcaaattattaaaagccaaagatgagagctccggcgcctatcctgacaccttcaaacatgaagggtctcacgatctgcaaaaactgccgcgttttcggtcttaccgcggcttcttattcggtagcctcaatgccgacgtgcagccgctggaggagtatctcggcgaaaccagcaaaattatcgatctgatcgtcgatcaggcgccggaagggctggaagtgctgaagggctcgtcgagctacgtttacgaaggcaactggaagctgggcgcggagaacggcgccgatggttatcatgtcagcgtggtgcactggaactacgcctcaaccatgtcacgccgcaactatgaagcggaggggacgcatgcggttgacgccaacggctggtcaaaaagcgtcggcggcggctacggttttgacaatggccacatgttgctgtggacccgggcgctgaacccggaagtgcgcccggtctatgcccaccgcgagcgtctgcaggcggagttcggtgaactacgcgccgaccagatggtcaacgaaacccgcaacctgtgcctttatcccaacgtctatctgatggatcagttttctacccagatccgcgtgatccgcccgattgctgttgataaaaccgaagtcaccatttggtgctttgcgccaaaaggcgaatccgaccaggcgcgggcgttacgcatccgccagtatgaggatttctttaacgtcagcgggatggggacgccggacgatctggaagagttcagcgcctgtcagcgcggctatcttggcgaaaatctggcatggagcgacctcagccgcggcgcgctacgttgggtcgacggcccggatgaacacgccaggcacgcgggcttcacgccgcggctaagcggggtgaaatcggaagatgaagcgctgtatatcgcccatcatcaccactggcaaacggtcatgctggcggcgctggaacaggaacaacagcgttacgaccagtccattacccagcgcgtggaggtggcctgatgttgaatctcgaacaagttcgccagtttctctattacgaagcccgtctgttagatgaccgtcagtgggatgagtggctgagctgttacagcccgaaggtggtctactggatgccggcatggggcgacgatgatcagctgacgcgcgacccgcaaaaagagatttcccttatctactaccccaaccgggaaggactggaagatcgcgtctatcgcattaaaaccgagcgttccggcgccagcacgccggagccgcgcaccacgcacattatcagcaatgtcgagctgatgggcgacagcgatgagggcttgctgtgcgctacaactgggttacgtggagccatcgctatcaacacactgatgcctattttggctctaccagctgcacgctaattgagcaggacggcaggccgcagatcgttcgtaaaacggtacgcctgaataacgactatatccgtcaggttatcgacgtttaccacatttaagaggcgcttatgacttttaatattgctcttaattttgaggacggcattacccgctttattcaatgccatgccggggagaaggtactgaatgcggcttatcgccagaaggtaaacctgccgatggattgttctgacggcgtttgcggcacctgcaaatgccactgcgccagcggtgaatacgacctgggtgaagattatctcgacgaggcgttaagcgacgacgaagcgcaggctcgccaggtgctgacctgccagatggtcccgaccagcgactgtgtgatcgatgtgccggtggccgccgcgcagtgtaaaaccgcgctgacccacaccggggcgcaggtgcgacaggtgaatttactgtccgataccgccatcgaactggtggtcgcgctggatgagccgctggcttttctgccggggcaatatatcaacattcaggtgccgggcactcctcatgtacgcgcctactcattcagctcgctaccgggttctctcgaagggcgttttctgatccgtaatgtgcctggcggcatgatgagccagtggttaacccagcaggcgcggcccggcgatcgcctgaccctcagcggacccatgggcagcttctatttgcgcagtggcgaacgcccgctgctcatgctggcgggcggcaccgggctggcgccgctgctgtcgatgctacaggccttgcagacacagggcagccagcgtcaggtaacgcttttgtacggggtgacccgtgacgccgatctggtgaaaacagacgcactggacacctttgctcaacagcttacagggtatcgctggctgccggtggtggcggatgaaaacagcatctgtccgcagcgcggttttgtcaccgaacatctggatgacgccatgttgaacaacggcgacgttgatatttatctctgcggaccgccgccgatggtgaacgctgtagcaacggcgctacgcgctagaggaatttcccggcagggttctggtatgagaaatttatcgccagccagagcgcggcggcataaggagacatgatgcgttttaccgataaagtcgtcgctatcaccggcgcggcgcaggggattggcaggcagaccgcggagcaggcggcaactgaaggtgccgccctgttgctgattgaccgctcgccttacgtgcacgaactggctgctgtactagcccagtccggaagtcaggtactggcgctggaggctgaccttgagcagtggcagagtactgaacaggcgtttgccgccggagttgctcattttggccgcctcgacgtgctaatcaataatgtcggcggtaccatttgggcgcgccctttcgctgagtatcagccagaacaaattgagaaagagatccgccgctcgctgttccccaccttgtggggctgccacgcggcgctcccctggatgctgaagcaggggaaaggcagcatcgtcaatatctcgtcggtggcgacggcaggggtgaaccgggtgccttattcggcggcgaagggaggcgtgaatgcgctgacccgctcgattgccatggagtacagcggcagcggcattcggattaacgccgtcgcgccgggcggtacggaggcgccgccgcgcctgacgccgcgcaacgaagagttgccgagcgagcaggaaaaggcgtggtatcagcaggttgtcgatcagacggtggcgagcagcctgatgcaccgttacggcacgctggcggaacaggcgaatgcgatcctgtttctcgccagcgatgaggccagctatatcaccggcgtaacgataccggtggcgggcggcgacctcggctagcggcgagtggcgtaccagcagagcagggagccgagacacaccatcccggctccctgccagaaggaccatgagagcgcggcgctgagtagcactgccgctaacgcggaggagagcacgggcgtgaagtacgacgccgccgccaacaggctgacgttgccgtgcaggatgccaacgttccatgccgcgtaggccagccccagcgccacggagaccgtaatcagcttaatgactaccggccagctaaatagcatcggcggctgcgcgctggcaaaaaatttcagccacagggtcagcgccgttaataagacgaagagggtaatgccatttttgcctttggcatatttcgcggtaaccgtgcagtaggccgcccagataaacgcgccgataaatgccagaaaatagctcagcggactggagatgacgttattgataatttcatcgaggttgagtccgtgttcgccgccgagcacccagctcacgcctaacagcgccagcagtaagccggggatcaccagccagctgcttttctgaccgttaaaaagaatggcgaataaaatagtcaggctgggccagaggtaattgaccatccccacttcgatagcctgctggcgggtggcggcgaaacccagcgacagagcgaggcagatctcgtagctgacaaacagcacgctgccagccaacagatagcggtgcgggatctggcgcaggttgggaaagccaacggtgaaaatgagcagcagcccgctgaggctataaatcatcgccgcgccgccgacagggccaagcccttcgctaacgccacggatcaaaccgaccatcgtgctccataagataatggcggcgaagccgattgacgtcgctctctttttttccatgtttaacctgatagtgactcaaacgcagccagaatttataacatcttttcgctcacggcagtcgatcttttccgtgccacctaactcttttgggttagtcaaactctccgccgctgactcttaaggggcgagcgttggcgaccttgatttgacgcaataaaaaaagggcattgctgttagtttcctccgcgcgatgaatacacatcctgcatggaggaatcaatggacgtcagccgcagaaagttttttaaaatctgcgcaggcggtatggccggaacaacagttgccgcactgggctttgcccctaaaatggcgctggctcaagcacgcaatttcaaattgctgcgcgcaaaagagatccgcaacacctgcacttactgctccgtgggctgcgggctattaatgtatagcctgggcgacggcgcgaaaaacgccaaagaagcgatttatcatatcgaaggagatccggatcatccggtaagccgcggcgccctgtgcccgaaaggcgccggtctgctggactacgtccacagcgaaaaccgcctgcggtatccgcaataccgtgctccgggctcggataaatggcagcgtatctcctgggatgaagcttttaaccgcatcgccaaattgatgaaagccgaccgcgacgccaactttattgaaaagaacgagcagggcgtgacggttaaccgctggctttccaccgggatgctgtgcgcctcggcggcgagtaatgagaccggcatgctgacgcaaaaatttgtgcgctcgctcggcatgctggcggtagacaaccaggcgcgcgtctgacacggaccaacggtagcaagtcttgctccaacatttggtcgcggtgcgatgaccaaccactgggttgatatcaaaaacgctaacgtcgtgatggtgatgggcggcaacgccgcggaagcgcatccggtggggttccgctgggcgatggaagcgaagaacaataacgatgccacgcttatcgtcgtcgacccacgctttacgcgtaccgcgtcggtggccgatatctatgcgccaattcgttccggtaccgacattacgttcctgtcgggcgtgctgctgtacctgatcgaaataataagatcaatgccgagtacgttaagcattacaccaatgccagcctgctggtacgtgatgattttaccttcgaagatggcctgttcagcggctacgatgctgaaaagcggcagtatgataaatcgtcctggaactaccagttcgatgaaaatggttacgcgaaacgcgatgaaacgctcagccatccgcgctgcgtgtggaatctgctcaagcagcacgtttcccgctacacgccggaagtggtcgagaatatctgcggtacgccgaaagatgacttcctcagagtgtgcgaagtgctggcttcaaccagcgtcgcggatcgcaccactaccttcctgtatgcgctgggatggacgcagcacaccgtcggcgcgcagaacatccgcaccatggcgatgatccagctgttgctcggcaacatgggcatggcaggcggcggcgtcaacgcgctgcgcggacattccaatattcaggggctgaccgatttgggcctgttgtcgaccagcctgccgggttatttgacgctgccgtccgataaacagagcgatctgcaaagttatcttagcgccaacacgccaaaagcgacgctggccgaccaggtgaactactggagcaactacccgaaattcttcgtcagcctgatgaaatcgttctacggcgatgcggcgcggaaagagaatgactggggcttcaactggttgccgaaatgggatcaggcctacgacgttatcaagtacttcaatatgatggataacggcaacgtcaccggctatatctgccagggctttaacccggtagcgtccttcccggacaaaaacaaagtggtgcgtagcctcagtaagctgaaatatatggtggttatcgacccgctggtgaccgaaacctcgaccttctggcagaaccacggcgagtctaatgatgtcgacccgtcggctattcagaccgaagtattccgtctgccgtcgacctgctttgccgaagaggatggctcgatcgccaactccgggcgttggctgcagtggcactggaaaggccaggacgcgccgggcgaagcacgcaacgatggcgaaattcttgccgggatctatcaccgtctgcgcgagctgtaccgtagcgaaggcggtaagggcgcggaaccgctgctgaacatgagctggagctataagcagccagatcatccggaatcggaagaggttgcaaaagagaacaacggctacgcgctggcggatctctacgatggcaatggggtactgctggcgaaaaaaggacagttgctgaatagcttcgcgctgctgcgcgatgacggcagcactgcgtcatcttgctggatctacaccggttgttggaccgagcagggtaaccagatggcgaatcgcgataacgccgatccttcggggttaggcaatacgctgggctgggcctgggcctggccgctcaaccgccgcgtgctgtataaccgcgcatcggccgatattaacggcaaaccgtgggatgcgaagcggatgctgatccagtggaacggcagtaagtgggtcggtaatgatattccggacttcaatatcgcaccgccggggagtaacaccgggccgtttatcatgcagcaagaggggcttggacgcctgtttgcgctcgataaactggcagaagggccgttcccggaacactacgagccgatggaaacaccgcttggcaccaacccgctgcacccgaatgtggtctccagcccggtggtgcgtttgtatgaagatgatgccattcgcctgggtaagaaggataagttcccgtatgtcggtactacctatcgcctgaccgaacacttccatacctggaccaagcatgcgttgcttaatgcgattgcgcagccggaacagtttgtcgaaatcagcgaagggctggcgaaaagcaaaggtatcgctaatggtgactgggtgaaagtcagcagcaagcgcggctttattcgcgcggttgccgtggtgacccgccgactacgcacgctgaacgtcaacggccagcaggttgaaactgtcggtattccgctgcactgggggtttgaaggcgtggcccgtaaaggatatatcgccaacaccctgacgcctaacgtcggcgattccaactcgcaaacgccggagtataaggcgtttctggtcaacattgagaaagcgtaaggagcgattaaatggcgatggaaacacaagacattattaaacgctccgcgaccaaccagatgactcccgcgccacgcgcgcgggactataaggccgaagtcgccaagcttatcgatgtctcctcctgcgtgggctgtaaagcctgccaggtagcctgttccgagtggaatgacattcgcgatgaagtggggcactgcgtcggcgtgtatgacaacccggcggatcttagcgctaaatcctggacggtaatgcgctttagcgagactgaacagaacggcaagctggagtggcttatccgcaaggatggctgtatgcactgcgaggagccgggttgcctgaaagcctgcccgtccgctggggcgatcattcagtacgccaacggcatcgtcgatttccagcaggaaaactgcattggctgtggctactgcattgccgggtgtccgtttaatattccgcgtctcaataaagaggataaccgggtctataaatgtacgctgtgcgtggatagggtcagcgtcggtcaggaaccggcctgcgtgaaaacctgtcctaccggcgcaatccatttcggcacgaaaaaagagatgctggaagtggcgcaggagcgggtggataagcttaaaaaacgcggttataccaacgccgggatctacaacccgcagggcgtaggcggcacccacgtgatgtacgtactgcatcatgccgaccagccggagctgtatcacaagctgccgaaagcgccgcagatcgataccagtatcaatctgtggaagggggcgctgaaaccgctgtcggcggcgggctttattgccacctttgccggtctgatttaccactacatcggtatcgggccgaacaaggaagttgatgacgatgaggaggaacatgatgaataaatcgaaaatgatagtgcgcaccaaatttatcgaccgcgcctgtcactggacggtggttatctgtttcttcctggtggcgctgtcggggatttcgtttttcttcccgacgctacaatggttgacggaaaccttcggtacaccgcagatggggcgtatcctgcacccgtttttcggggtgctgatttttgtcgcgctgatgtttatgtttgtgcgttttgtccaccacaatatccctgataaacaggatatcccctggctgaaaggcatcgtggaggttctgaaaggcaacgaacataaggtcgcgcgcgtcggtaaatataacgccgggcagaagatgatgttctggaccattatgagcatgatttttgtgctgctggtgaccggggtgattatctggcgcccatattttgcggaatatttcccgataccggttatccgttacagtctgctgatacacgccacttcggcgattatcctgatccacgcgatcctcatccatatgtatatggcattctgggtcaaagggtcgattaaaggcatgatcgaaggcaaggtgagccgccgttgggcgaagaaacatcacccgcgctggtatcgcgatgttgaacgcctggaagcgcaaaaagagagccgtgagggaatgaagtaagcctttacgggggaaacccgctctgaagatattggggcgggtttacgtatttgttataagcgcatcgatggcggaaataacagccgttctttctttatgtaaattacagacgaaatatttattattcaggcgctgctttgctacgctggttattcccggggtgttgaggaatagcttttgaaagtcaagatttactagtggagctgcagggtgataatgactcaccatatgtatatgattactcagtggcaaaactaaccttgatgataaatcatcataataatcatgttgaatcaccataagataaggttggagttcatttgtcctcggtgatggattgcgataaacatcaaattgcatgataactaaatcccttcgaagaatgggtcttccgacagtaaaccggcgcgcgcggtaaattcattcatggcatttatgaattcctggtgttgctgtaggctttccgcatcactaatggtttgccgatcgaaggtctgtttaatcgccacatcagactcgttgagctgttttttattgatcgcattgcttttcattttctactccctgtgattgacaatttgattatccctgcattcaaccgaaaaataaacgtcgttaataacgcttttttatattttgcgaggcgggttccagcgcaacgcaacagatgaaatattaacgtttgttgtaataatcctttgcgcaggggtaatactgcgcaaaggtgataaagccattccatcaaaatttctccggaataaaccggaaaggaaaatgcgttggtttcactttgccaattttgcgttttggtaaggtaatgtgttccgttggtagagactcgtaggggatctgcgaaagcaggtgagtaataatattcaggcgcacgcgttttttatcttccgagcgggcgacaaaccacggcgcccaggcggtatcggtggcggcaaacatcgcatcgcgcgctgcggtgtaatcatcccagcggttgaaagatttaatatccatcggcgatagcttccagattttgcgcccatcatcaatacgatcgcgcaggcgccgttcttgttcctgtggcgtcacctccagccagtatttcagtaaaataatgccggaatcgaccatcccacgctctaccatcggcgcgccgtcgaggaatttttgcacctcctcctcggtacaaaatcccatcacccgctcaacgccggcccggttataccagctgcgatcgaaaatcactatctcgcctgcggcgggaagatgtttgatatagcgctgaaaatagagttggctacgttcgcgttcggttggcgcgggcagggcgacaacgcggaaaacccgcgggctgacgcgttcggttatcgctttgatggtgccacctttgccggcgccatcgcgcccctcgaatacgatgcataccttaagccctttatgcactacccaccgctgtagcttgaccaactcgacgtgcagtttacgtaacgcctgctgatacgctttctcgcttaacggctccgttttggcggctatgacgggcgcaacggctttcttcttgtttcccatggctgtcctcatgcgtggtggcctgaaaggcaggtcgctgtttaaagtgtaatcagagccaggcaaagcggcggaaaacttctcatccagtggagggcacaagataaccattaatcgcatcatctcactgttgcttaatcaggaatcgggtaggatagactcgtcaatttgctaaaatcattcagggagagagtatgtcgaataaacttctgcaagtgcactttgcttttagcggcccgtttggcgatgaaatgtcggcacaattagccgaacttgcgcaatctattaaccaggagcccggttttatctggaagatctggacggagaatagcgccacgcaggaagccggcggcatatatctgttcgaagatgaacagagcgcgcaggcttatgcgaaaaaacacgccgcacgcctacggcaatttggcgtgcaggagatgttcttcaagattttcgacgtcaatttaccactaagccaaattaaccacgggccgctcaattaatatgggaccgtggttacatatagcgctcaaactgccatgccgccacggcttcgaggataaacagcccggatacaacgatacccgccacgcgatggcgggaatagaacagtattcccgcgaccacggctaacaccggtaacgtaatgggccagcaggcgacaatagtaatccaggcgatgatcagataatccttcatcatggcgaatactccatggtcaacgtttaccggcgctcacgatgcgccggtataaatcagaattcgacgacgccgccttgttcaatacgctcaatgtcattagtgacgggattcactttttcgttgtaataggtgtaggcgttaacgtcgggcgtcatcgctaattttggttgttccgttttcgactcaggtaattctgtctgtggattaacggcaagatctgccggttccggcggcgtatagtgtaactggtcggcgagactgcccgccgcgaaggcgcaggtgttaatagaaagcgcgctgatggcgataataattaatttatttaaagtcatgattttcatccatgaggcgaaacccgccacggaggcaggtaaaaagagcaaggcttaagataatacgtaaaagaagttaatgtttcaaagcgtaaacgccgtctggtcgcataaaattgctactcctcgataattctttatggtagctgcctgtaataccgagcattccccatcacttgtcattgatttcacattaatgcagcaaaattttcactagttttgatcatctccgcacttttgcaccagcccggtgcgcaaggttgctaaagtcgttctatgtttagctcactgtcggtatggacaccagcgttcccggcaggccacgtgacggcaacagacctcctgacctgtaaagactggcgcatcgccggggtggtaccgattgcggtcacgctacgcgactattagtaatcgatctggcgatacctctcttcctggcgggttttttgctttatctaccgaagccgctacggcttattccagcattggcacgttacgctgtaagtggtttttactgcgccagtttatggcgtctgttcgatatcgctgaggactatccgaatgtctttaaaacttaaaaagttgactctgcattttgcaatagcaggttgtttgagcgcggcattttatgcacaggcggatgtgaagattggcgtggccggcccatttaccgggccgaatgcgacctatggcgcccaatactggaaaggggcatcgcaggcggcagcggatattaatgccgccggggaattaaaggcgaaaaaattgtgctggtgcagggcgatgatgcctgtgaacccaagcaggcggtggcggtggctaaccgtctggttgatgactctggcgtctcggcggtggtgggccatttctgctcttcctcgacgatgcccgcttccgaggtctatgacgaagccgggatcctgaccatcacgccgggctccaccaatccgcagatcaccgaacgcggaatgaaagatatgttccgcatgtgtgggcgcgatgaccagcaaggggtgattgccgctaactacatgctggatgtgctgaaggcgaagaagatcgccgtcattcacgataaagatacctacggtcagggattagccgacgcgacgcgcgcggcgctcgctaaacgcgggacgaaagaggtgttgtatgaaggcttatcccgcggggaaaaggactttaatgccctggtaaccaaaatcggcgccctgaaaccggatgtggtttatttcggcggctgccatccggaagccggtccgctggtgcgccagatgcgcgagcagggcgtccaggctaagttcttctccggcgactgcgtggtgaccgaagagttggttaccgccgcgggcgggccgcagtttaccaatggcgtgttaatgaccttcggtaaggatccgcgcaccattccagaaggtaaagcggtgatcgacaaattccgcgccagcggttttgaaccggagggctataccctttacgcctatgcttcaattcaggctatcgccgccgcctataacgccgccggtaccgataatgccaaagccagcgaatggctgaaaaaccacagcgtcgataccgtgatggggaaaaaagcctgggatggcaaaggcgacctgaaagtatcggattacgtggtttatcaatgggatgataaaggcaaatatcatcagctgtaacccgggattgtagtgcgcataacgccctcatcagaggggcgtcgtaccaccataagcagcagacgttaaggcctctgcgtctgctgcaccttgactggcaggatggttcatatggcggcattctttctgcaacaactgatcaatggcttaacgcttggcgcggtatatgggcttatcgccattggctacaccatggtttatggcatcatcggtatgattaacttcgcccacggcgaggtatatatggtctcagcctatctgtgcgctatcgggctggcgctgctggcctacttcggtattcactctttcccgctgcttattttcggcacgctggtgtttacgattatcgtcaccggggtttacggctgggccatcgaacgcattgcttatcggccgctacgtaactcaacgcgtctggcgccgctgatttcggctattggtatgtcgctgattttacaaaactacgtccaactgagtcagggcccaaatcaacaggggatcccgacgttgatgcacggcgtactgcggcttacggtaggagatggcgtggtgcaaatcacctggaccaaaatcttcatcctgctcgccgccttcatcggcatggtggtgctgagctggataatcaaccacacgcagctcgggcgcgtatgccgcgcgacccagcaggatcggcggatggcggccattctcggcattaacaccgatcgggtgatctcgctggtatttatgattggtgccgccatggcgggccttgccggggtactggtgaccatgaattacggcacgtttgatttttatatcggctttattatcggcattaaagccttcaccgctgcggtactgggcgggataggttcgctgccgggggcgatgcttggcggcctgctgctgggcgtcgccgaggcgcagttcgccgggttagtgaactcggattataaggatgtcttctcgttcgcattgctggtggcgattctgatatttcgtccacaagggctgttaggccgccctgttgtcgccaaggtataagggggatatatgaccgatatttcccgtttagacggcgtcgacgtcaagcgcagcgttatcgatagcgtattggccggtttatgcgcgctgatagtctttggcccaatcgtggggatcgtgctcaaggggtatagttttacgctttcccgcagcgtgtcttcgtgctggtggcggtggtgatggcggggcgcctgttgctcagcctgcttttgcaaaccccggtgggaagcggtttgtcggacgttttgaaggcaacgaccagggggtgttcgtccgccccccggctatcgtagtcggctacgttttgtcctgccgctgctggcgatcgtggctatcgctttcccgttaatggccagtaagtatctgctcaccgtggcgatcctcgggcttatctacgtcctgttggggctgggattaaacatcgtggtaggtctcgcagggttacttgatttggggtacgtcgctttctacgccattggcgcctatggcctggcgctcggctatcaataccttggcttaggtttctgggcaatgctaccgctgggggcggtgatggcggcgctggcggggcattattgggttttccggtattacgaatgcatggcgactacctggctattgttaccctcggattcggcgagatcatccgtctggtactcaacaactgggtaagtttcaccggcggccccaacggcgtttcggtgccgtcgccaacgctcttcggcctcgagtttgccaggcgagccaaagagggcggtaccccgattcatgaatttctgcatatcgcctacaaccccaatcttaaatttatttttatctatgccgtgttatttatcgtggtaatgatggtgctgctgataaagcaccgcctgacccgaatgccgattggccgcgcctgggaggcgctgcgggaagatgaaatcgcctgccgggcgatggggctgaatcacgtactggttaagctgtccgcgtttatgctcggcgcctcgacggccggcatcgctggggtctttttcgccacttatcagggcttcgtgaacccgacgtcgtttacctttttcgaatcggcgctgattctcgctatcgtggtattaggcggcatgggctcgacattgggtgtggtactggcggctttcgtgctgacggtcacgccggagctgctgcgcggctttgacgaataccgtgttctgctattcggtgtgctgatggttctgatgatgatctggcgcccgcgcgggctggtgcgcaccgggcgcacaggagtgggaatccgcaaaggagtcgcgccatgagcgatgcgattttgcaagtcgagcatctgatgatgcattttggcgggattaaagcgttgaatgatgtcaatctcgaagttgaacgcggatcgattaccgccctgattggcccgaacggtgcgggcaaaaccacggtgttcaattgcctgaccggattctaccgcgccagcggcggcgccattcggcttaatgcccggcaacgaataaccgatgtgattcaggttctcgggcagaaactgcatgccgatgattttttccatcccgcgcgcctgggtcggcggatgtactacaaaatgttcggcggcgcgcatctggtcaaccgtgccgggctggcgcgtacattccagaatatccgcctgtttcgtgaaatgacggtgattgaaaatctgatggtggcccagcatatgcaggtcaaccgccatctgatcgccgggatcctgaatacccgcggctatcggcaggcggagaaccgcgcattagatcgggccttttactggctggaggtggtggagatggttgactgcgccaatcgactggcggggacgctctcttatggccagcagcggaggttggaaatcgcccgcgcgatgtgtaccgggccggaaatactatgtcttgacgaacccgcggccggactcaatccggcggaaacgcgtgccctgagccggattattcgttttctgcgtgaacatcatggcgtcaccgtactgttgatcgaacacgatatgagcatggtgatggaaatctccgatcgcgtgatcgtgctcgaccatggcgatgttattgctcatggcaccccggccgagatccaggccaacctgagtgtgatcgccgcatacctgggtaccgatgaacaggagatcgcctgatgaaccaaccgttgctggaatttcgcgaggttaacgtcttttacgggcaaatccaggcgctgaagtcggtatcgctaacggtcaatgaaggcgaaacggtggcattaatcggcgccaatggcgccggaaaatccaccctgctgatgtcgattttcggccagccgcgtattaccgatggcagaattatctatcgtggacatgatatcagccgtcagtcgacgcactatatcgccaccaacggtattgcccaggcgccggaaggacggcgtatttttgccgatatgacggtggaagagaacctgctgatgggtactattcccattggtaatcaatatcagaacgaagataaggcgcggatgtatcagctgtttccacggctggaagagcgtcgcgcgcagcgggcgatgacgctctccggcggcgagcagcaaatgctggcaatcgcccgcgcgctgatgagccgcccaaagctattgctattagacgaaccgagcctgggtctggcgccgctggtggtgaagcagatcttcagcgtcttgcgcgagttgaccgcccagggcatgacgctgttgctggtggagcaaaatgcgcactacgctctgaaactggctaaccgcgcttatgtgctggtcaacggcgaaattcgcctgagcggtagcggcgcagagttgctggataacccggaagtcagaaatgcttacctggggatgggttaaggtttcgtcggtcataagatggagaaaacaaggtgtgaaatcggttacactagcgtcgtgaacgcacattaaagtgaccgaatagatgaagaaaacgattttttccttagcgctggggacctttggcctcggaatggcggagttcggcatcatgggtgtattgcctgaaatcgcccacgatgttggcattaccatccccgcggccggcaacatgatctcgtggtacgccttcggcgtggtgtttggcgcgcctgtcatggcgttgttttccagccgtttttcgctgaaatcagtgatgctgtttctggtggcgctgtgtgtggcaggcaacgcgttgtttaccttctcctcaagttatcccatgctggcgctcggtcgctttatttcaggttttcctcacggcgcttattttggcgtcggggcgattattttgtcgaaaatcgcctcgccgggcagggttaccgccgcggtcgccgggatgatcgccggtatgacggtggcaaacctgcttggcgtaccggctggcacctggcttggtcatcagttcagctggcgttataccttcacggccatcgcgctatttgatgtgctggtgctattggcgatactgcgctgggtgccgacgctgtatgacaaatccacctcccggctcagcgaacaattccatttccttaaatccccggcgccatggtttattttcgccgccacgatgtttggcaatgccggcgtttttgcctggtttagctatatcaagccctttatggtgaatgtctccggttttagcgagtcggcgatgatgttaattatgatgctggtcggattggggatggttttaggcaatctctttagcggcaggatctcagggcgctacagtccgttgcgtattgcggcgatgaccaatggcgtcattgtcgcagcgttactgctcatctttgcctttggcatgcagccgctggcttcgctggcgctgtcgtttatatgctgcgccgggcttttcgcactcgccgcgccgctgcagatactactgctacaaaatgccagaggcggagaaatgctcggggcggcgggcgggcagatagcgtttaacctcggcagcgcgattggcgcctactgcggcgggatgatgattacctttggcgtgggttggcgttcggtcgcgctgccggcggcagcgctgtcgttcctggcgatgagctcgttgctgctgtatgcgcgataccagcggcaggtaacgcgtcatcgcgttacccaggcagagcaggcctgattaatctcgccacggttcgccaagggttagcatcaggcggttagcccaggcgaagaatgccgtcgattgcagcaggtccagctgttcgacgatatccagaccctgctgctccagcgcgctgagatgcgctggggttatcgcgggcggggtgacggaaagcgcggcggcggcgtcaatctccacctgccagcgcggcccttgaccatcgctgagattctccccaggcgttaccgccagcagggtctccaccgctcgctcatctttagacaactgtgccgccttgcgtgcgtgtaccgacgcgcagtagatgcagccgttgattttactcgccaccgtggccgccagttcacgctcggcgcgcggtaggccgcccggcgtatagaaaatccctttatcggtcagcgtgcgctgttcaagcaccggctgattgcgcgccagtaagcgaaagtagggggaatcactgtggccgaactgcgccagcagcgcctgctcggcggcgttaaattcagcgagaggcttatcggcaatccacggttcccagtgtaattcatcacgagtaaacgccaccggcgcaggtttaccgctagccgtccggggatgagtgtgccagtagccggcaaccaccggggtcccggctgcggaaattggtttgccatttaacaatcgtaatccgctcagcaatcggctttgaaaactgacaaacgcaacaagctgcgccagcgtcacaatacctcgcaggctccagcccgcgtcgctcagcgtttgcagcgccgcgggcgtcgcttccaccggggtgaaggtcaacaggcgggcaaaccccagcgaagcggcaagccgtggggttgtcgggtcggcaataccgaaaccggcgtaatgcgccgccagtgcgtctgcctgatgaagtctggccacttttgcggcgacggcgaaccgttcttcgagcggaaaatcctcatcctgttggctaaatagcacctcgtaacttccctgggcgtggcgggtcgcagcctcgcgcaaagcgcgggccttgcccagcgctgaatcggcggcgatctccgccagttcagccaaaatatcctgacttaagctcatagcgactccttatctgaattgcggggcaatgtgtttagcgatgagttcgatagaacgcagcgtgtcctgatgcgatggctccaccgaatggacctgaaacgaaatgtcagtcacgcgggctagcacgctgtctttgaccagcgattcaagcacatgtgtcgcatcgccaatgtgggcatccaactggcgagcgtaatccgtgacggtgtcaccaataatctcatgaccggcggcgcgatgggctgccgcctgtttacttaatcccggctctgcggcctgtagcgcgtacccctgactgtcggcaataaacgcggtacgggaggccagaattcgcggcgacacgccggcaggcagcgcggcgaggtaggcatcgataatcgggttctgaatcgcatccagcggcagctcgctttgacctggcgggcgcggctgtgtgcgcgatagcatcaacccgtggccggatttcgcggcccgaatagcgccttcaatcgaaaaggtggcgatccaaattcgctccgccagctgcggcgcaggaggataaaggtgattgtcaggatgagccaacgtatcgccgcgccaggcgctttcaatcaaatgcagatgatcggcgaagaccgtgccgcgttgttcacagaccaggccaaaggggagaaaagaggttggcgttccgccggaaccaaaacccacttccaggcgaccatctgcgagcaagtccagcactgccgcatcttccgctacgcgcagcgggttttccatcggcagcgtaatgatggcggtaccgagacggatccgttgcgtatgggccgccgcgtgggcaagaaacaccagcggcgacggtaaaccgccttcattttcatggaaatggtgttgcgccacccaggcgctatcaaagcccagccgttccgcgtggcggatctgctccgtcgccaggcgatagcgctcttgcggcgtggcgcggtcaagtaggcgggtgaaaaatccgagatttttaggcatcatgcaatctccgtgctgggtgcgtgataatgaggaatggcggcgagtagctcgcgggtatagtcgcgctgcggcgcggcgaacaactgcttaacctcgccttgttcgatgacttgcccggcgcgcaacaccgtcacgctatgggcgatgcggcttaccgtcgccagatcgtgggtgataaacagatagctcaacccaagctgttgctgtaattgcagcaacagggcgagaatttgcgcctgcaccgtgacatccagcgctgaggtggcctcatcaagcaccagaatcgtggggtcgaggatcaatgccctggcgatagcgacccgctgtcgctggccgccggagagctcacgagcggttcggttgagtagctccggcgccagcgcgacgcgggcggcgacggactctacccgctggcgccgggcatctttgggcaggcgctgaaaattcttcagcggctcttcgataatgtcgaacaaggtctggcgagggtcgagtgaggcgaaagggttctgataaacaaactgaattttgcgccgcagctggcgctgggcctcgcggctcaattgtccgctggcaataccgtcgatggtcacctgtccgctatcggcctgctcaaaacccagcaagatacgggcgagggtggtttttcctgaacccgattcgccgaccagcgcatgggtactgccacgcggtaaaataaagcttacgttatccagcgcctggagatggctgccccctaacgcaaagcgtttgctcacgccttcaacccgaattgccggcgtaacaaacgggcgaatcgtggtggttaagtgcaggttctgtccctgcagatcgcacagcaactggcgggtatagccgtgctgcggggtacgaataacatcacccgtattgccctgttcctgaatttcaccgtgacgaaaaaccaccagccggtcggcacgctgcgccgccagcgcgaggtcatgggtgacaaatagcaccgcggtgccggattcacggcgcaaatgatcgagcagatcgaggattcttttttggaccgtcacgtcgagcgcgctggtcggctcatcggcaataatcaaatccggcttcagggcgatggcaatggcgatcagcacccgctgcttcataccgccggagagctggtgcggatactgctcgaaacgctgctctggatggcttaagccgactttttccagcagggcgataacctgctgtcgacgctcggttttactgcttttttgatgcagtcggagtatttcgctgacctgcgcgccgatggtttgcaccgggttcagcgagttgccgggatcctgcggcaccaggctgattctggccccgcgcaggttatccagccgtttgcctgaccagcggctaatctcttcaccgttgagacgaaccgtcccggcatcgaggcgggcgttttccgccagcagaccgataatcgcctgggcggtggtggtttttcccgaaccggattcgccgacgaacgccagcatctcgccgcgtttaatcgtaaaactgacccggtgaaccacttcgcgccacaacccgccagagcggtagctgatggtgaggttttctacgctaagcacgttcatcggcgctccctattgagttgttggctgatacgattggctgccagtaccacggcaatgaccgcgatcccggggaaagtggtgagccaccaggcggtggaaagatagttgcgcccctcggcgataagtaatccccattccggcaccggcggcggagtgccgtagccgagaaaactcagggttgagagggcgagaatagcctggccgaattgaagggtggcgaaagccagcaccggcgaaagcgcgttaggcagaatatgccgccagaacacggccaaaaaggttcccccgctaccataggctgcttcgacatagtcgctgtgacgaatgcgcacgacttcggcgcgcgacagtcgagcgaaactggcgatcgcggcaacgccgaccgccatggcggcgttcagagtgccaaaaccaagcagtatgattaccgttagcgaaagcaggagcgaaggaatcgccagcagaatatcgacaatccgcatgacgaccgcttcgacccgcccgcccagcgcgccggcaacggtgcctaacgcggtgccgacaaccaggcccatggcgacggcggccagggccgcagaaagcgaatgccctgcgccgtagacgatacggctccacacatcgcgaccgagctggtcggtacctaaccagtgtcccgcctgcggcgccagacgctgggcgccagcgatgccgtcgagcggattaaactcggtgaaccattgcggcgcgaaagccatcaatatcgcaaccgtcatcaccgaccatgccagccacagtcccggctgcaaggaaaaacggcgccagttgaccggacggcgtcgcaccgccgaggcgtaatcgaccagactcatagtgcacctccgcgcaggggttttaagcgcgggtcgagcatcggcatcagcagatcgaccagcagattaatgaccacgaagcccagcgctgaaatcatcaccacggcctgaagaatggcaatatcctgattattcaccgcctgctgcgtaagttggccgagcccgctgcggccaaaaacggtttcggtaattaaggccccggcgatcagttctcccaacagcaggccggcaatgtttaatgtcggcaacagagcattgccggtgacatgccgccataacacccgcgtttcgctcattcccttggcacgagcaacggcaacgaagggttgtacggcaatgtgatccatggcgcgtaacaaaatttgcgccagcggcgcggaaatcggtatcgccaccgcgataaccggcagcaccagcccctgcagtggtccgggattgataaccgggacccagtgcaattgaaatgaaaagatttggattaaggcgatgccgagccagaaggtcggtagtgaaataaacagcaccggcaacgactgtagcagctggctgataccgcgtagccccggcaaacgcgaagcgatagcaatcgcaaaggccagcaggacagccagcgcgaaggccggcaacgccagcgccagcgtgtcgggtaaattgctggcaatcaggtgactgacaggcagtccagcctggagtgaatagccaaaatccccctgcagcatggctaacaaggtgtggaaatattgccgccacagcggactgtctgcatcataggccacacgcatttcggcgatctgttgcgggctcagccccaggtcggggttctgaaacttaatcaaaatcgcgtcgccgggcagtacctgcagcagaaaaaaggtcagggtgaaggccgcccacagtaccagcacgccttgtgccaaccgtcgccaaagatagtggctcatgccgcctccttagtgtttatccagccatgcgccgtaaaacgacggacgacccacggcttcaaaacgtacgccttttacccatggcgcgccggcaaagacctgcggttcttcaaagatgggaatgacgtaggcgttatccagcagataacgctgcgcgtcgccagttaactgcaggcgcttttgcgcatccacttcggcagagattgcggttaacagggcgttgagcttatcgtcacgaaaggtttttactttgtcactcgaaccgccctgttgcagtaaggcatcgcggttggcggggaagaacatactcttcaccacatccgggtcggcacgaccgacttcagagacggttaatggcgttttcagcgggtcgaggttatccagtacccggcttccggcgtcgccggctttcacgcttaaggccacgccaacctgacgccactgctgcgcgacaagctgtagcacctctttgttctgcggctgcggcagggattcatagacggttagcgccagccgtcgtcccgctttttgccggataccatccgcgcctggggtccagcccgcctcatccagcagctgtttggctttctgctgatcgaaggccagtttgtcgcttaaatcgacgtatcccgccgcggtgcgggcgataacggaacttgcctgcggatagtttggcgagaaaagggtctcaacaacctgtttggcgttggtagcatgcactagcgcctggcgtacccgcaggtcggcaaccagcggattatccggacggaagctcaggctatcgttaacgccgcgcgtcggcgcggcataaatattaaagccctggtcagttgcctgtttttcatcataggcctgcacctggcgaataaacccggcctgtcccgccagcagcgcgccaatacgtacgctatcttccggcgttacgatataggtaatgccgtcgaggttcgccgggccttgctgagcaagatttttcggcccccattgataatctttacgcgccaccagcgttaattcgcgtccgggtttttcatcttttaccgtaaagggcccggaaccgatgatattgcgggcatcgcccagcgcctcaaagctccgcgccagcgtactgagggaaaccagcccggagccaatcgttgcggtcccttgcaggaatcccggtgagggctttttgaaatagaatttgacggtcaacggatcgaggacttcactacgatcgtaattgttgatcacttcggaaaccggcagacgcagtgctttattgcccaaaccgtaggtatcaaagttctttgcgaccgcattggcatcgagcggggtaccgtcagagaaggtgacgccaggccgcagcttaaaggtatattcggtcttctcgtcgttgctactccagctttcggcgatccacggctcgatagctagcgtttccgggttttgccaggttaacttgtcggttatctgattgaggatcccgccgttagggtaaaaaccgccggccggcggatagagattagtatgcggctgttgttccagataaattaaggtgccgcctttgatcggcgtttgcgccgccgaaaccgaaaacgcgcctgcaataaaaagggcggcaagcgtaggcaggcgaaagcgattttgcatggtgaattcctttgttatctattgtcttgccatcatcgggcgcgacggaatacaaaggaaccaacgatttgcgctaagcatttgcgaaatctgactattcccatcatgcgggaatagtcagcaggttaggctctttcgtctggcatagtcagacagaattaacggcggaaatcgataaccatacggccgcggatttgaccctgttccatctccttaaagatggcgttgatatctccgagcgggcgcagagtgactttcggcaccactttgccttcggcggcaaactggaaagcttcaatcagatcctgacgggtacctaccagcgaacctactacttcaatcccgtccagcaccagacgcggaatatcgaggctcatcgcttccggcggtaggccaaccgcgacgacgcggccgccggcgcgaaccgcatccacggcagagttaaatgccgctttagcaacggcggtaaccacggccgcgtgggcgccgccggttttctcctgaatgattttggcggcgtcttcgttgcgggaatttaccgtcaggtcggcgcccatcgaggcggcaagctccagttgcccgtcgttgacgtcaacggcgatcactttggcattgaagacgttcttggcatactgcagcgcgagattacccagaccgccgaggccataaatggcaatccactggccgggtttgatatgcgagaccttcaccgctttataggtggtgacgccggcgcaggtgatgctgctggcggcggctgaatccagtccatccggtactttgaccgcgtaatcggcggtgacgatgcactcttcggccatcccgccatcgacggtataaccggcatttttcaccgagcggcacagggtttcgttgccgctgttacagtattcgcagtggccgcaaccttcgaagaaccacgccacgctggcgcgatcgcccggcttcagcgacgtcacgccagggccgactttttccacgatgccgatgccctcatggccgagaatgacgccggttttatcgccgaaatcgccgttttttacgtgcaggtcagtgtggcagaccccgcagcattccattttcagcagcgcttcgccatgctccagcgggcgtaactttttatcggttacatcaatctggtggtcgtgggtgactacagcagctttcatgcgtttctccttgttaatgatacgaaggtgctaacagcgaaaataatactcattaaggattagatcttatgtcgctaattacaagcggtatggttgggaatggggggatttgccgcatatttggcacaatattcatccgtttataccaattttagggggcgcaacccgaaaggatctgagtatgccagggtcattgacagggcgtgttgataatggttgtataatgcaaccacctttcgcggatattaccatgcctgacactttacttatcaatcaaattcgttccgcatcacgattgatggtgcgcgagctcggctttatgaacagcacgctggcggcgaccgactattcaccttcagcggtgcatgcgctgctggagatttctactcatggcgcgatgaccgccgcgcaactggtgcaggtattggggctggacaaatcgagcgtcagccgaatgttatcgcgcctgcagaccgctaacgagatagaggaaaatggttgtgttgatgacgggcgttttaaacaactctcattgacaaccaaagggcaggcgacggtcgcccgcattcatgagtacggcgccatgcgggtgattgaggcgctggcgcatttggatagcgcacagcagcagatcgttgccgaggggttgacggcctattcgtgggcgcttgagcgctgtcgtcagctgccggtcacgaccagaccagacgatatcacgatagtcaccggctatcagccgggaatgattggccgcattgcgcaaatgcacggtgagtattacgcccggcattacggcttcgggcatttttttgaaggtaaagtcgccagcggtctggctgaattttctggcaggttgaacaaccaacgtaaccagatttggttggcggtcaaaaatggcgtcatcgtcggctctgtcgccattgatggcgaagacctcggtaataatgaagcgcatctacgttggtttattctcggcgatggctgtaggggtagtggcgtggggcgccgcttgctgactgaagccatcaacttttgtgataatcagcgcttcgatgcgattcagctatggacgtttagcggcttgcaggcggcgcgtaaattatatgaatcctttgggtttacgctgagtaaagagtggcagggcgatcaatggggaaagacaatgcttgagcagcagtttacccgccgctaaagccgtcatgccaccggggcgctgacgctccggtggcaaaggtatttaactcagatgggtatttatctcctcaatctcctgacgccacagcgcctgtagctgcggcttctgatgcttcggcttacgctgcagatcgtccgccaacaattgctccagcatcaccagacgctccagcaaatcctcttgcaggtcgtcgacgggcggcgcctgcggcggcgtttgcgtcgccgggctctgaaggcgctcgtagccgcgcagacgggcgtacacctcgtcgacgtcgtgccactcgcttaacccgttttcatcaattaaccagaagcggttacagctttggctgatgagctgtcgatcgtggctaaccagcagcaggccgccgggatattcccgcaatgtctgcgccagcgcctctttaccctccatatccagatggttggtgggttcatcgagcagcagtaggctatagctcgccagcgacaggccaacaaacagcagccgtgaacgttcgccgccgctgagggtgctgaccttctgtccgtgtcgcgcccagccgaaaccggcggaaatcaacgcccgcttgcgcgtttccggcgaaggctcaaagggctccagcgcctccagcaggctggcctcatccgccagttgatgcagggtttgatcgtaataccccggatgtagccgcggatgtaaacgcagcccggcttcggtagccggttgctgcatttgccgccataacaggcgcagcagcgacgattttccgccgccgttgcgccccattatcgctacccggtcgccgctttgtagtcgcgccagaccggtggtgaacagggcggggagaccgggcgctggcggtacggggagattttccatctccagcaggcggtcggcgcgaacggcgtcgccatgcacctcaagacgccacggcgtgccggcggtgagttccgtctggctatccttcaggcgtgaaacctgtttttccatctgtttggctttacgcgccagatcttcgttatcgtaaacccggccccagatggccagccgtttggcgctggcagcgacgcggtcgatctccttttgttccgctttgtggcgcagagcatcgcttgcatcttgctcttcaagtgcccgacgggcggcgctgcagggtagcgagaaagcgtgcagcgtgttatcacgtaaaatccaactggtattagttacagcatccagtaagaggttatcgtgcgacaccaccacgaagctcccctgccaggtttgcaagaagctttccagccacagcagggtcggcagatcgagatggttgcccggctcatccagcaacagcaaatcgggctgttggatcaacgcgcgggcgagcaacagacgagtatgttgtccgccgctcagggtggcggcttgctgttgggtctgttgaacggtaaaacccatttcagcgagcagtcgctccgcttgccagcgcagcgaatcccgttcgccaggcgccagtttttccagtaccacctgcaatagcggttggctgagtagggcgtcaggcagatgttgttccacgcgcgccagcaggcagtgattagcccgcgatacgctgccagaattcggcgtgagagtgccgtccagtacctgcaatagcgtgcttttcccgcaaccgttatagccgataaggccaatgcgatcgccttttttcagggtaaaggagaggtcgttgaaaagtgtgccaaaggccgtatcaacgtgaagagattgtgcgcttaaaagtgtgctcattgtgaacttactcaagagttacaggcatgagaatgcctcgtcaaacatcgctgacgataacccggtaagcccgaggaagggatttagtcgttggcttcttcgctcaagctaaagttatcgcagcacgataccgataacgcttgagctggtgcgatcgccaaatgtatgtgaaacattaaacagttcacagtacagcatggggatcctccttattttttcagtaggttgatggatgcagggagtgtagtggctaaattgtcttttgaccagataccagcattgaggatcgtgccgccggtcttatcggcggcgggtaggacgattaggccggggccacggtgagtagtaggttggcaaaacgacgctgttcgccggaagcgatgaccagttgggtcaacggcagccgggactttgcgtagaatgcctggcgttcgacaaattcaagtgggcagtttgtcggtagaagctcccggtattcactggcgatggtgttagtgaattccgctggtgatgccatcagcgtcgcgtgttcgacattaacgcaggtaagcagtttttcgacgatataagttgccggtaccatgcctggcgcgaggttcagctgaatcaacgtggcatcggcattggcattaacgcgacaggcaaaattgctatccgcgatgagaatttgtgatttatggccgcagcacgccagagcagccagcagttgtggatggataatttcgaatttgatcatcaggaactccctggcgggcggcgatttctggccgcccggtttgcattacatgcgataaattccgccgttaatgtcgatagtggcgccggagataaatccgtcatactcgccggcaaggaaagtaatggcgcgggcgacgtcgtcgggtgttcccgcgcgctgaagcggaatttgccggatggtttcgtcagccgaagcctgtgtggtgtggcggttatgaaaacgggtgccgaggataagtcccggcgcaaccgcgttgacgcgtacgccgtgctcgcccaactcagccgccagcgagcgtgtccaggtcagaattgccccttttgtggttgaataggcgagagaaccggcatgcccccggagcgccccgccagcgaggcgaggttaatgatgctggcgccatccgttgccgatttaagccacggaagcgccgcctgggtgacgttaagcatggtggtcatattgacgtctaacaccgtttgccagaactgacggtcaatttcgccaagccatttacgcccgacgataccgccaacgttattcaccaggatgtcgataccgccgaggaattccgcggcggcctgtacgcaggcggtcgcgtcctcagtgtcaatcaaatccgcatagcgccaggccgccttttgccctcgcgcgctggcgatagcagccaatttttgcgggccttcttcaccgctgtgatagtgcaaaaagacatcgcatcccgccagaatcagtttttccgccgtagcccagccgataccttgttcagagccggtgataaatgctttttttccaataagagttcccatgatgtttccttaaattttcaggattgaatgacgccttcgcgctgtctggcgcagtagaaaatgcaaatcaggccggtgatcagcaggcacatggcgaggaatatcaggcccggcgtgctgctgtggctgaagtcgttaaggaggccgaccacgtagggggcgacgaagccgcccaggttgccgatacagctcaccacggcgagacccgcggccgtcgctgcgcctgccgagacgttggcaggcatcgataagaaacacggcaccgcggtatagatgccaatggcggcaatggtcaggaatgagagtgaaaccgcgacgttgaacttaaagaacaccaccgcgccggcgagccctaatgcggcgacgaccatgctgataccggcaaaaacggcgatttttcgcgttttactcgccagcatgctccatggataaaccagtagcgctgccagtccgtaggggatgagggcaatcatgctaacgcgcagaatgtcatcaccggaaatggcggtaataatcgacggtagccacatcccaaagccgtaaatcccgcaaaccattccgaaattcagcagcgcataaagcaggtatttgggatttttaataccgctggcgaactcagtcagcgagactttactacctgattttgaacggtttgtactactcattaaccacgccttttcttcagcgttgagatagccgacttcctgtggtgaattcttgataataaaggggatgaacaggccaataacgattggcggaataccttcgaggataaataaccactgccaggattcaaggccaaaccagccgttatcgatatgcagaattaagcctgaaatcggtgaacccacggcgttggatagcggctgaacaataataaacatgccgagaattttggtccgccaggcgggcgggaaaaagatcgtgaagtagtacaccaccgaagggaagaaaccggcttcgcacacgccgagcataaaacgacagatatagagttcggtcggcgttctgacgaagcccatcaaggtggcaaatattccccaggttatcagaatacgcgcaaaccacagccgcggaccgaacttaatcgtgccggcgttgctgggaatttcaaacataaaataaccgatgaaaaatattcccgaagcaaagccaaaggcggtggccgtcaggccaaggctatcttccagcgccattgcggcgtaggccatattattacggtcaagaaaagccagaaaataaagcaatatcattaatggaacaatatgccatgttaatttcttaatggcgctcttttctatatcttgcgcagattgtagattcatcattatttccggttatactcgttaaagtacaaaagaatgggatgggaatcccgacattaatatgcattttgaatgtaatagggtgtaagcctccatgcagataataaatattatctgcatcatgctatttttataaaaacaactatggttgctttattttcaccgactggcgctgaatgacttccggagcgaagataaattcgtcggtttgtaatcccggctcagcaattctctggacgagccgctcaaccatcatcgacgccattgccgaaagcggggccattaccgaggtgaggcccggtgacgataacgccgacagggagatgttatcgatgccaatcaccgaaatatcttccgctattttcaggccctgcgcgcgtagcccaaccatcaggccgatggctaaagcatcgttaatcgccaccacgccatccactcgcggcgttagggcgctaattttttgcgccaggcttacgcccagttcgaacatctcggcgtcgccgaattcccgattgcctttgccttctatcaccgcgcctctggccgctgtggcgctttgggaaagcgcggactgaaagccgaggattttatggctgcgtcccagcgttaacccgctttcggtggcaaagacgatattacggcaaccattgtccaacagatgttgcgccgccagacgtcccgcttcaacgttgtccattgagacactatcgaagtagcgcgcccgaggcgggacgctttcggccagccggttgtcatagctaataatagtcatgccttgttccgctgcgcgcacaaagtgggttttgcgtacgtcgctggcagcgactatcaacccgcgcacgccgtgggagaacatatccgcgataaacgctgactcctcgtcggcatttcgacagcaaatgcctaataaaagccggtggcgaaacacgcgtgccgcagtatccagttcatgggccagcgctgaaaagctgggattgacgatagacggtaccatcaggccgagcattttggttgctgaatcggcgaccggcggagcgcaacgcgcagggcggtaatttagctcagccatcgttttgactatccgctgtcgggtctcttcgcgcatctgttgcgtgcgattattaagtacgttggacacgctactaattgaaactccagcccgccgggcgacatcacgaatattcgccatacttaaaccttctgttttctgctgcgcgcttatttcagcgccgcggtatctgtttgctaatttatcggtgagcgaacaggcgggcaaggtatttacctcccggcaagcgagtgaaataaaacttctgtgaagcgcctcgtaaggatgggcaggtgtttagtaaacaaaggggaataaataacggcaaagggcggggataaaaaaacgggcccgcagttcgggcccgttgaaataaagcgttaaattgaggttcggcgatagttacgatattccggctgccagaaattatcgctaatggcctgcagcagcgcttcggccgatgttttcaccgccacgccctgttcctgagccactttaccgacagcgaacgcaatagcgcgcgacacggcctggatatctttcagttccggcagtaccgggccttcgccgttattcaccagcggcgagtggttggctaaggtttcgcttgccgccatcagcatctcgtcggtgacgcgcgatgcacccgcggcgataacgccaaggccgatgcccgggaagatataggagttgttacactgcgcgatggcgtactgtttgcccttaaccgtcaccggcgtgaacggactgccggtggccaccagcgcttcgccgtcggtccaggtcaggatattctgcggcgtggcttcaacgcgggaggtcgggttcgacagcggcatgacgatcggccgcggacaatgcttgtgcatttcacgaataatttcttccgtgaacagccccggctggccggagacgccgatcagaatattcggcttcacgttacgcaccacgtcgagcagcgagagcgcttcgttggtcgtatcccaaccttgcaggttttcgcgcttctgcaccagcttgctctggaacgacagcagattcggcataccgtcggtcaacaggccgaagcggtccaccataaatacgcgctggcgggcttcctcttcgcttaacccttcgcgcatgatttgcgcgatgatctgttctgcaataccgcaaccggcggaccccgcgccgaggaagacaattttttgctcgctgagctggctgcccgcgccacggctggcggcgatcaatgtgccgacggtgaccgccgcggtgccctgaatatcatcgttaaacgagcaaatctcgttacgatagcggttaagcagcggcatggcgtttttctgcgcgaaatcttcaaactgcagcagcacgtccggccagcggtttttgatggcctggataacgtcgtcaacaaattgataatactcgtcgtcggtaacgcgcggatgacgccagcccatatacagcgggtcgtcgagcaattgctggttgttggtgccgacatccagcacgataggcagggtgtaggccgggctgataccgccgcaggtggtatagagcgacagcttaccgatagggatgcccataccgccgataccctggtcgccgagaccgagaatacgctcgccgtcggtcaccacgatcactttgacgttatggttcggtacgttttgcaggatatcgtcgaggttgtgccgattctggtaggagatgaacacgccgcgcgcgcgacggtagatttccgagaaacgctcacaggcggcgccgacggtgggggtatagataaccggcatcatctcatcgagatgattgccaatcaggcgataaaacagggtttcgttggtgtcctggatgttgcgcagataaatgtgcttatcgatctcggttttaaatccctgatactggatccacgcgcgttcagcttgttcttcgatcgtttcgaccacttccggcagcaggcccagcaggttgaagctgctacgctcttccatgctgaaggcgcttcctttgttgagtaacggaaactcaagcagaaccgggccagcgtaggggatataaagagaacggttttttttatagatgaattgcatcgcactaactccttgatgttcacttcagacccgggcgcggcgataagcgatcgggctggcaggaaatgcagcgggcagagtatagagcagatggtaacaaaagaaggatgcgaagcgtgggattgtcttaaaaaaacaccatcccgtttagcggatggtgtttttatcatcactcagctgaaatattaaccaccgcggcgtttgcggcccgtagcatggatatggttaacggtagtttcttcgtcgccttccagcaccacttttttctggcgggaaagcttgtagttcagaccgagaagatgacgtgcctgatggttcgatttcattcttactccttaatcctgttctggtttcaaggacaagcccgacgcaagccggacgaaacgtaacccaaagtacgccgcgctttttaacgcgacgggattatcgtggtccatttttttgcgaatagcaaccttgcgtcggcagattaagagcgttctcgattcaggcgtggccgattaccacttcatctcgccggtgttcactttcgcgctcagctccagcgaactttcttcagcgagacccggatattgcgcctgcatggttttgatgacgctggcggaatctttatgcgctttcagcgcctgctcaaatttctccagatagtcgcgggtaaagacgatagccttgtcgcccgccggtggcgtgccgagatagtggcccgggatcacctgttgcggatgcagtgcggccatatcgctaagggtctggcgccactgctgacggctcgccgcgctttgggtatcggcggtccagacgtgcatgccccaggcgacgccggtgccgccaagaatcgctttattcgccgggatccagacgaacgcggcgtagttctgcggctgacgaatttccactttttcgccatcaatggtgaagttatctgcggctaatacctgtggaacatagacctgcttcggcgcgccgtctttcatctgcgggccccaataagccagcttcgccgctttggtctcttcaatatgcttaaccacttgctcggttgccaccactttggcctgcgggaaggctttcaccagcggctcgaggccaaaatagaaatccggatcgccagaggtgatcacaatgtgcgtgagcttcttaccgcttttgttgatcatctcaaccagcttttcgccatctttaacgctgaactgggcgtcaaacagcaccgcttcgtgcgggccggaggccagcgtggagttcaccgcgaagatcgcgttctcctgcgggttgtaggtttgcagggtcaacggcgcggcaaaagcggtggtgctgaacagggcggtggcgatagccagggcagatactttcatgttggttttctctctttcaggtgaataggttcattttacgtcattctcgatttgcgaaaattcctgaaaaaagagatgctgagtttcataaaacgtgcagatggatacggatatggatcgagttatcgccgcccaggtatatatgcggatatgcgagctgggcagtttgagcgcggccgccagggcgcttggtatgtcgcgaccgatggtgagtcgctatctggagcagatggaacactgggccggtacccggctcattcatcgttcgacgcgtaaactgaccttaaccagcgtaggcgaaaaggtattgcagaaaacgcgtagcctcacgcaattggcggatgagatagcggggcagacggaacgcgcggtgccgagcggcacgttgcgggtcgcctgcgcgcactttaccgccatgcagttgctctcaccgctgctaccggagtttttggcccgttacccgcaactgcgtctcgaactggatatcaacaaccatccggtgagcctgattggcgagcgtatcgatgtcgccatccggatcaccgataatccggagccggggcgatagcgcggcggctcggcatctgccgctcggtactctgcgcctcgccgcggtggctccagcagcatggccagataaattcgccggaggaactcagtcaacataactgtctccactatagccatttcgccaccccgacatggcagtttaccgatccgcagggcgaacccgtgtcggtggccgtctccggcaacctgagcgccgggatctcctctctgctgatggaagcggcggtggcgggatgcggcatcgccatgctgccggaactggaagcccggcgcgcgctaaagagcggcgcgctaaaacaggtgatgcctggatatacgccaaaatccctggccgtctatggcatctatctgtcacgagattatcagcccagcgcgctgccgctgtttctggaggccattcagcaacagttgtcccaggtcagctagagctgtctatacttactcctttaacgtcaaaaaggagtgaaacgatggcaattcataagaaaggtcaggcgcattgggaaggggatctgaaaagcggtaaaggcaccgtctcgacggaaagcggcgcgcttaaccaacaaccttatggttttaatacccgctttgaaggcgttaaagggactaacccggaagagcttatcggcgcggcccatgccgcctgtttctcaatggcgctatcattaatgcttagcgaagagggctatacggcgacctctatcgataccgttgcggtggtcacgctggataagagcggcggcggcttcgccatcaccaagatcgcgctgcagagcaatattgtcctgccgggtatcgataaagcggcctttgatccgattatccagaaagccaaagctggctgcccggtttcgcaggtactgaaagccgacatctcactcgattatcagctcaacgcttgaaccgtggcgcgcccgcgggaacgcgggcgcgttggcgtttaaagtcaccgtcggcaaatgcctgccgccgcgaatggtgttatgttggtggcgttacggatagcgacgggcaacgcaatgaacagcatacgcggcatgattgaatcacaggtcctgggtttaaccgggatggcgttaaaagagattgattttgaaaacccgaagggcgagccgggcttatttggcccgcagtcggctatctggcaggtacacggcgactttacctcaatgctctgcggcggcattagcgcgctactgttacagatgctgcatccgctggcgctggccggtgtgtgggatcattcgcgttttcgtgaggatatctttggccgtctgcgccgcaccagtcaatttatctcagccaccacgtttggcactaccgacgatgccgaaagattaatcgccaaagtgcaggggatccaccagcgcatcagcggcgttgcgccggacggtaggccctatcgcgccagcgatccggtgctcttaacctgggttcatgtggccgagtgcagcagctttatggcctctcatctgcgttataagcgcaccatcgtcactgccgcgcgtcaggagcaatactaccgcgaagcggcggaggtcgcccggcgacttggcgccgaagacatccccgaaacgccacgtcaggtggcggagtatttgcaggatatgcgccccagttacgttgtgatgaacgaacgcgggaggtggcgcaggtgctgcttaccacccgtctgccgggccggctaagccagccggtagggcgctggatgatggtagccggtatcgatctgcttcccgattgggcacagcagatgctggcgatccccatcaatccactgcagcggcgaaccgccagagtggcggtcaatggcgtggcgcgggtactccgcgcttcggtgcgcaatggggcttatcactgcgctatgcgccgaatggcaacattataaatagagaagatcaataatggccgttgaatgcggctgttattttaaaaacgtaatcattcgcatttatatattataactcaggttatttattttaaatttattatcaacgagccattaatattgaatatcgctgattaataccaggctatcatccacactttattcgggagggatgatggaaaataaaaagcaacagaatgataataaatatcatcagcgttcacaggccgcgcgaaaaagcaccctggtcagcgtagtcgttaatctgtttttatcgaccgggcaaattatcgctggcctgttttcagggtcgcaagggctaattgccgatggtatccactctctttccgatttaattgctgattttgtggttctgattgccaataacaaaagccgtaaaccttccgacagcgatcatcattatggccactggcgctatgaaaatggcgcgtcgctgatattgggcgcaattttaatgattgtcggcgtgggcatgttgtggtcggcggtggataaactactccatccgggaaccattcaatccgtacatgtaacggcattatgggtggccgttgcagcgctgatcgcaaaagagacgctattccgttatatgctggcggtagcaaagcgtattcagtcgtcattattaattgcgaacgcctggcatgcgcgctcggatgcggcgtcgtcggtagtggtggcggtagggatcgttggcaatctcgcggggatggtctggttggatcctgtagcggcattgttagtaggggtattgattacacgaatgggttacacttttgccggcgatgctttacatgatttaatggatcgctcggtcgacgcgcaaacccagaatgcgatacgcaacaccatcgccgcaaccggcggcgttgtgggtctgcatgatctaaaaactcgtaaggcgggcgacctgatcctcgtcgatgtccatattgaagttccgggcgagctgtcggtgcgtgcaggccatgcaatcgcgctggcggtgcgggaaaatgtgctcgcgcgccatgaggtgctacaggtgatgattcacattgatccatacgaagcgcccggcggcgaactggctcacgcgtaaacaactttcgactcctgcctgcaggagccaacgctaccttgccgttaattggcaataacagaggatgatatgaaaattaacgaacctcaggcgattactttacccctgccgcgaacggcgatatttatcgtcgcgaccatagcgcgcagcgcagagagcctgagccgcgtgcgcgactggtgcgatgattttgccgcggtggtgcgttcagttggcactcgcatgccggaggcggggatttcctgcatctgcggatttggcgctgaaatctggccgcagttgtttggccagcccaccccgcagcagctgcatcctttccgccgcgtaggcagcggagagcgcgtggcggtctctacgccgggcgatctgctgctgcatatccgttccgatgatatggggcttagcttcgagctggcgacgcagctgatggacaagttgggggacgccgtaacagttgtcgatgaagttcacggcttccgctatttcgaccgtcgggcgatgatcggtttcgttgatggtagcgaaaacccgcaggggcgcgcggcggcggatttcaccattatcggcgatgaagacccggatttcgccggtggtagctacgtgattgtgcagaaatatctgcacgatatggcgggctggaatgcgttaaccgtcgaacagcaggagcgtattattgggcgaaaaaaaatgaccaacatcgaactggatgccgacgtcaaacccagctgttcgcacagttcgctgaccacccttgaagagaacggcgaggagattaaaatcctgcgcgacaacatgccgttcggcaaacccggcatgggcgagtttggtacctattttatcggttatgcgcgcagcccggcgcccatcgaacagatgctggaaaacatgtttgtcggccgcccggccggtaattacgatcgactgctcgattatagccgcccggttaccggcagtctgttctttgtaccttccgcgacgctacttgaagaattatccagtcgtcaggctgaataaccctgcataatatcggccattacgccgctactgatggtttatttctccggcctgctttgcaggccgtatattgcgtggaaaataaaaagagcccataattaaaccaccattaattcatcgctaattaatggcggttatcaacgcgatgtcgtgtttgtgtacaataaaattaaccaatggcttaatagataatatctatacccatcatctttcattagggtatgtactaagcatcattgggtcttcaggaagtaatacaatgatcatccggccagaacaacactggttttttcgtctgtttgactggcacggttccgtgttgtcaaaaattgttttccgtctgctattgaacgttctgatgtcggtcatcgccatcatcagctatcaatggtatgaacaacttggcattcacttaaccgttgcgccatttagcctgttggggatcgcgattgcgatttttctcggctttcgtaatagcgcgagctacagccgtttcgttgaggcgcgtaatttatggggaaccgtgctgattgctgaacgaaccctggtcaggcaattgaaaaatatccttcccggtgacgaggaaacgcataaaacgttagtcagttatctggtggcgttcagctggagccttaagcaccagttgcgtaaaaccgacccggcggtcgatctgtatcgcctgttgccgaaagaaaaagtggcggaaattctcgccagctcaatgccaactaaccgaattttattattgattggtaatgagttaggtaggctgcgtgagcagggtaagctcagcgatattacctacggcttgatggacaataagcttgatgagttagcccatgtcctgggcggctgcgagcgtctggcgagtacgccggtgccgtttgcttacaccttgattttacagcgcacggtgtatcttttctgtacattgctaccgttcgcgctggtgggggatttgcattatatgacgccgtttgtttcggtgtttatctcctacaccttcctgtcctgggattccctggcggaagagcttgaggatccgtttggcacttcggcaaacgatctaccgctgaatgcaatgtgcaataccattgaacgtaatttgatggatatgaccggacaacatccgttaccggaaaaaatgcagcctgaccgttattacaaccttacataaaaaaacgccgggcgggtcagcccgtccggcgtttagtattagtgagtgcgcattcctgccgccgtcatcaacagcttaaagagggtggcgaccacgccgagcgccagcacgctggcccccagataatcaccagccacatcagtttgcgccagaacggacgatgatgcctcgttaacgttttatcagattgagttgccatcaatgatacccctcatcgggtttgattttgccgcggaacacgtagtagctccagcaggtgtacatcaaaataaccggaatgatcagcaacccgccgaccagcataaagccctggctctgcggcggcgaagcggcctgccagatagagattgccggtggaataatattcggccagatgctgatcccaaggccgctgaacccgaggaacaccagcgccagagtgagtaaaaacggcccatagctggcctgacgattataggcgctacggacaatcccccagcagcaaaccagcaccagcaacggcaccggcataaaccagatgatattggggaatgtaaaccaacggtgagcgatttccgggtgagtcagcggcgtccagatactgataatggcgactaccgccagcaacgccagcgtcagtgggatcgccagctcagacattttgcgatgcagagcgccttcggttttcattatcagccaggtgcatcccaaaagcgcgtaggcaatcaccagcccgatgccgcaaaatagcgggaagggcgccagccagtcgagtgtcgagccgctaaactcacgacccgtcacgctgaggccgttgagcagggtacctacggcgatcccctgactaaacgtcgccaatagcgaaccgccgataaacgccttatcccataacggacgatgttccggcgtcgccttaaagcgaaactcaaacgccacgccgcggaaaatcagccccagtaacatggcggttaacgggatgctgagcgcatcgataatcaccgcgtaggccagcggaaacgccccatacagcgccgcgccgcccagcaccatccaggtttcgttgccgtcccacaccggcgccacgctattcatcatcatgtcgcggtcggtttcatttttattaaacgggaacagaatgccgatcccgagatcgaaaccgtccatcacgatatacatcaaggtggcaaaaacgattatcgtgaaccagataattgacaggtcgatacccatattattttctccctgaggtattcataggttcgcgcaccgcggacagcgggcgggcaggggtttggttctgagtcgggtcctccggcgtgtgcgcactttccggccctttttttatcaggcgaatcagatacacgtagccgacgccaaacaccgaggcgtagaccacgataaaggctagcaggctcagagacatatgcagatcgccatgggcggagaccgcatcccgggtgcgctgaacgccatagactacccacggctggcggccaatttcagtggtaaaccagcctgccagtagcgcgaccagcccggaagggcccatcaacagggcaaaacgcaggaatggttttgaggtgtacagccggcctcgccaacgcagccaggcgctgaccacgccaagcagtatcattaacataccgagcccggccatcaccctgaacgaccagaagataatggtggaatttgggcgatcttctttcgggaaactttttaaggccggaacctgtttatcgaggctatgggtcaggatgatgctgccaagatagggaacctcaattttatatttggttcgttcctcttccatatccggcagaccaaacagcactaatggcgtggcctcacccggtttattctcccaatgtccttcaatcgcggcgatttttgccggttgatgttcgagcgtattcaggccgtgcgcatcgccaatcatcgcctgaatgggggcgacgatcagcgccatccacagcgccatcgagaacatcttgcggattgccggcgtgtcattgcccttcagcagatgccaggccgccgaagcgccgacgaaaaaggcgctggcaaggaaggcggcggtggacatgtgcagcaggcgatacgggaatgaagggttaaaaacgaccttcagccagtctaccggcaccacgatgccattctcgataatgtagccctggggcgtatgcatccagctattggacgcgaggatccagaaggtggaaaacagcgtgcccagcgccaccatacaggtcgcgaagaagtgcaggccgcggccgacacgatgccagccaaacagcatgacgccgagaaagccagcttcgaggaagaaggcggtcaggacttcataggtcaatagcggcccggtaatactaccggcgaactgcgagaacccgctccagttagtgccaaactgataggccatcaccagcccggaaacgacgcccatgccaaaattaacggcaaatatttttgaccagaaatggtagagctggcggtaggtatcctcttttgtttttaaccacagcccttccagtaccgcaaggtaactggcgagaccaatggtaatagcggggaaaatgatgtggaaagatacagtaaatgcaaactgtattcttgctaaataaaaggcatctaatccgaacatggctcacccctgtacgacattacttcattgtatttatggaatattttctgcatagcggatacggctttacctgcgcaaagcctcctgttgatgacaattaaattacggcgttgccgggcattgaaatatgttaatgcccttgataataaagtttaaaaataattctttaattatcaaataggttaaatttaacacccgatagataacatctattatacaacacgaaatggcatgttattatttagttaacgaataaagttactcatttctttttaaccagacatttagttaaagattaaaaacaacgagttaaccctgtcatttgctattcattgaaaaaagaaaagcggtattttccgcttaattactgtggttatttaacatcaccgcaaaaaaccgtgaccaatgttgttaataacatccgttagctgaagagagtattcaggagttcatatgaataagaaaaaacgcgctgtccccggtgttcatccctatgatggcccagcgggtggatggggggcgttaaaagcgaccgccatcgccgtgcgtacgcaaatggacgcgcttgacgccccggtcacgctgctgcgtaccaaccagcctgacggttttgactgccccggctgcgcctggccggataaagaacataaatcaaccttccagttttgtgagaacggcgcgaaggcggtcacctgggaagctaccagcaaacgcgtgacgccagagttcctcgccgccaataccgtgacctcgctgctggcgaaaagcgactttgaactggaaggttacggacgtattacccatcccttgtcttacgatcgtgagagcgacacgctgcgtccggtctcctgggaaagcgcgtttgcccgcattggcgaagtattacagagtatgcaacccgatgaagttgagttctatacctccgggcgcgcctctaacgaagcggcatatctgttccagctttacgcccgcgagttcggcaccaataacttcccggactgctccaatatgtgccacgaggcgaccagcgttggtctgccgcaatcgatcggtatcggtaaaggcacggtgtctttggacgactttgacaaaacggaactggttatttccatcggtcacaaccccggaaccaaccatccgcgcatgatgggcacgttgcatgaactgtcccgccgcggtgtgccgattatcgtctttaacccgctgcgtgaaagggcgctggaacgttttgccgacccgcagaacgtcatcgaaatggcaacctacagttcgacgaatatcgcctcgacctatttccaggtgaaagcgggcggcgatgccgcggcgctgaaagggatcgctaaagcattactggagatcgaagcggaccagggccaggtgctggaccaggcgtttattaacgagcacaccctcggcttcgacgcttttgccgaagatttacgccagaccagttggccggaaattgagcgtgagtccggattaactcgcgacgatctgcagcgcgttgccgttgcctacgccaaatccaacgccactatcgtgacctatggcatggggatcacccagcataacaaaggcacctctaacgtccggttgattgccgaccttctgctgatgcgcggcaatatcggcaaaccaggggccgggatctgcccgctgcgcggtcactctaacgtgcagggtaaccgtaccgtcggtattaccgaaaaaccgagtaccgagtttctgaataatcttgaaagcgtgttcggctttgtcgcaccgcgcggacatggtcacgatgcggtgaaagcgctgcaggcaatggttgccggcgacgcgaaagcgctggtctgtcttggcggtaatttcgcggtggcgatgccggatcatgagcgggcgttcccggcgatgcgcgggctggatcttagcgtgcacatcggcaccaaactgaaccgttcgcatctgctggtggcgaaagagacctttattctgccttgtctgggccgcaccgaacttgatatgcaggagagcggacgtcagtcgattaccgtggaagactcgatgtcgatggtccatgcctcatccggcaaattgaaaccggcctctgaccgtctgcgctcggaaccggctatcgtcgccgggatggcgtcggcgacgctgccgaacagcaagatcgactggttatcgctggtggctgattacgaccgcatccgcgatctcatcgagcagactattcctggatttgagagttacaacgaacgtattcgacatccgggtggtttccgtatgccgctgccgccaaccgagcggatctggccgacgccgaccggcaaagcgatgttctcggtgttcaaaggcgtccatgagaactcccgcgttgacggcgacgacgtgatgcgcctggttacgctgcgcagtcacgatcagtacaacaccacgatttacgcgatggacgatcgctatcgcggagtgtttggccgccgcgatgtgctgtttatgaatgagcaggatatggccgagcaggggctggagcatggcgaccgcgtcgatattttcaccgcgctgccggatagcgacctgcgccttgaggatatcaccgtggttgcttatagcatcgcgccgggcaccgttggcgcctattacccggaagccaacgtgctggtgccgctggattacatcgatgaagagagcggtacgccgtcgtacaaatcagttcctatccgcctgacgctgcgttcgaaagaggtgcgcgccgttcccggtctgcgttaatttgctgaatattgccagtggcctgcgatcgggccactggcaaatggcatcttgaaatcagcccataccgcaagtaacatttaaataacatatcttatcgcagctgtgttctgcatcgcgtccaccactgaccagcggacgtcactattctggaagttaagatggacattaaacagctgaaatatctgatcgcgctcgatcagacgcgccatttcggtcaggccgcggcggcctgccatatcacccaaccgacgctttcaatgcgtattcgcaacctggaagacgaacttaatctcacgctgattcagcgcggccaacgcttcgaaggcttcaccccggaaggggagcgcatcctcgcctgggcgcgggcgctgctggcggcgcacgacggcctggcggctgaagcggcgatttgtcgcggccagatggtgggccagttacgcgtaggcatggtgccgttagccagcctgaacccgatgcaattgatcaaaccgctggcggaaaaataccctgaactgcagttcagtctgctgtcgatgacctctgagcaaattattgacggcgtcagccgtaatcagctcgatcttggcatctgctatttgcaccacgttgatagcgcattatttaacgtcacctggctgccgaaaacgcgaatgggcctgctgcacgactgtcgccatttccagttcgacgcaggcattcccgagtgggagacattagccgggctgccgctcggtttccttaccaagggaatgtattatcgtgaatcgattgaaatgagctttaaagccaaagggttaacgccaaaatatgtctttgaaagcgattcgacatttcagataatccaggcggtacaggccgggatctgttgcgctatcatgccgctcaataacggcctggaagcgctgagcgacaatctggcgattattcctatcgcggaaaccgaggttgattccacgcttgcgcttatcatgcgcaaccaggagccggtgtcgtcgttggcggaaaaatgtttcgccgatgcgcaggcgatttttagcgaagcgccgcacacttaattggcggccaaatgctgctgcatgaaatcgagccagacgcgagatcgggctggtaaaaagtggcgttcgcgatacagggccacgagatgtagcggtgccgccggtagttccagttcaatcacctttaactgacctgaggcgataaacgggcggcaagcctgttcagcaaggatggcgaaacccacgccggcgacggcggcatgaagggcgatctctccgctattcacccgaaaatgagcctggacgttcacttttttaaacgcgttctgtgcggtgatgaattgccaggcttgccccttcagcgcgctgacggtggtgatgcagggaagcgagacaagctgctcgcaacgtgctggctgtccgcatttttccagcagcgaaggcgctgcgacaacacaacagggaaatgtcgccaacggcctggcgatatagctggcatcatccatttttccacggacgatggcgacggcaatatcgatatcctctttaagcgcgtcggctccggcaaggctgaccacacagcttacttcaattttgggataacgcatggcgaactgcgccagcagggggccaaaaagcgtcggtccaatctcgttgggaagacataagcgcaacagcccctcaggatcggcctgctgttgagttaaggccgcttcggttgccgcgagctgatcaagcaggggacgcatactattaaaaaaagcctgcccggcatcggtgagatgcatgtgtctggtgctgcgctggataaggcgcaattgcagtttttcttccagttgagaaatctggcgactgacatttgacgaaggcatacgtaatgcccgcgccgccccgctgaaactgccgttttccacgacactcacaaacacgcgtagtgcattcaaatctaatttactcaccgctaattatcccatttctgataactgaatagcccatttttaccgacttatgcgcttttttactagccgatacactgacgctccccctgatgagaggaagtctaatgaccataaatctacggcgaatgggcgcgataatcgcatttatccaatttaccaatgcgctcgaatatatgatcttcaatccgctatttgtctacatggcgccgacttttcaagtgccggtgagctgggcaggttatgtcagcggtatttatacgcttgcatcggtcatttctggagtaggcgcgtggcgcctggtgggaaagctaaatccgcgtaattttctactggttaatatggcgttactgggagcattaacgctgatggttcttgctacccagcactttatattgttgttgatactgcgttttttggccgggctcctcggcggaatgacgatgggtgtggccagtagtttactgatcaacgcggcggaccaggaacaccgagcgcgcttgttagcgacggtcatctctgccttttccctggtcagtattatcggtatgcccgccatgttgtttctctgcgaacgtttcggctggcagacggcgccggcattgattggcgtgctttgcctggtggcgctattcatgatctatcttggcctgccgaatattcccggcggcgtacgttctggaacacagatacgcatcacgccaacgatgctgttatttgccagcggcaatgcgttaacccaatttagtccgatgctattactgccgatcctggtgcctttgctgctgggcaatatgcgggcaggcagtgaggcgctaccttggttattctttctcggcggtatagcgggattcgcggcgacaaagttgagcggcagtctatatcatcgttttggcggctatcggttgagcctggcggcgaccgcagcttttattatcagtttgctgatggcgctatggctggacggcgcgagttggttgttcatgattgcctttcttggggcatcttatagccggctggttgcctcctcgtcggtggcgattcggttcccggacgataactggcgagcgggatttaccactctgcaaggaggtttcatgtccttcagtacggcgattgcctttatgctctgttcactgtggctggccgacggcgagatgagtcagcaggcgtctactgggttgattgcatttagcggagctagcgccttgctgctgccatgtttactgcgctatcaagaaaaaatactcgtacgcaacgccgccgaacgggtaaacggcggcgttggtgagctttaaatattttccaggcgaattccccgggttcttggcccaaatacgcctaccgacagcatgaccatcagcatactggcgacgataaagctaatcacccctggggtaccggcatattgcaggatcacaccaatcataatactagtaaccgcggtggacagacggctaaaggagtaacagaagcccaccgcccgggcgcggatgtgggttgggaacacctccgcctgataggcgtgatagctgatggtgagccaggcattggaccaggtgatcataaagccgcagataaccagcagtaccgggttattttgtaaagcgaacagtgtgccgaagatcaccgtcatcagcgctgacaggacaatttgccatttgttttcaaaacgatggacgaaacgagtgcagaacaggcagccaagggataagctagagtgataaagaaggcgtacagcaggctatgggtaatactggcgccctggccggaaagcagcgcgggtagccagttaccgaaaccaaagaagccgatggcctggaagaagttcatcaccattaacatgagggtgcgttgacggtactgcggcgcccatatcgctttaaaattaccgcgttgtggcgccgctactgccggactggcatggcgccgggaaggcgataaaccgcagcgctgttccatttcacacatgacccggtgcgcgtcatcgtggcggcctttgctttccagccagcgggcggattccggcagctttttgcggataacccaaatgaccagtgaacacagtgcgccgagaataatcacccaacgccagccgctcaggccgagaatggtcattggcaccagtagccaggacatcagcgccaccgtcggtaccgagagaaactgaataaagaaggcgtaagcgaaggctttattacgtaaatgcgtcggcatccactcactgagataagtatcaatagtcaccagttcaattcccaggccgatcccaaccaggaaacgaaagaaaataaccccttcagcgctattttgcagcgccataatcagcgaaaagatgccataccatgccagggcgaacataaaggtcacgcggcgtccgagcctgtccgccagcggcgcgagcagactggcgccgataaacagccccataaaggtcgaggaagcgaaggctgcctgatcggcaataccgaataccccgtctttcccggtatggaaaatattctcggcgagcaggccggtgctgatataaccggtctggaacaggtcgtagagttcgaaaaaaccgcctaatgccagcagggtgataaaagaccaaagaccgggcgaggagggcagagcgtcgatacgcgcggttaagctatcgggatgttgtcctggcgggctaaaggaggcgtcgccgagaacctgggtggtagacatattattattttcctcaggagaaatgtttgcctgctaatgttaattggttgttaatggttttaaatttttaattgtgagcggtgtggcgatttaatagttggaaatcatgtttaatacgctgatagatgataaatatgctgcttttttgtcagcgcagacggcagaattgaagtaaacgaccagcagtgaacaatcagatgaagagaaatggtgatttcggtgaaaatcacctacatttgtagtgtgtattctgtgtatacaaggaaaagaatatgttaaagcgtcaggcaataaaaacggcgttggcaatggtgatgtcagtaacgatggccgcggcaccggcgcttgctaatcccgggaacggtaatggcaatggtgaacatggcaatagcggtaaaaacatctatcatggcgataaaagcaataatggtcatagcgccagccaaagcgataacggcggcggcaagggacagcgtaagaactacggcaaaccggatcacgtcgatagtgatatcagctatagtaccgctcgcgcgctggcagtgaacttcggcttgaccggctatcaggccctgcctccgggaattgcgaaaaatctcgcgcgaggaaaaccgttacctccgggcatcgctaaaaaagcggtgccctcgtcgatgcttaatcagttaccttattatcccggctatgagtggcgggtcgttggcaacgatctggtattgattgcgctcagtaccgccgtggtcaccgcgatcattaatagcgtatttgattaatatcgaggccccgtggtaaacggggctttgcttttctaaaacatttaatttctttcttaaaccaatcctcactggggcgagtattaaactttacagctattattcgcgggctatactaagcacaactttacacaggagagatacgttggacagtcacccttatttaaacatcaaggcaaactgacgctatctattctgcgctgtttgccaaccggcaggcagcaatcctttcccaatcctgattgcctcctgagaactggaattcgcttttttgcgaggtaatttatcatgctattatttttctacgccctgttccctccgccttttacgcggtaacacacgctcacacaggcccttaaggctatctcactgcggtttagcaatctacgcaggaatatctactacgcgcaatttgtgagtgtgaaaaaataacatctaactatgcatgatttatttatgcagggattaccacatctaaatttggggatgaatcatgactgacatgaaattagaaaaccggaatgcaaaccggtctgcgtcagaaaatgataagcagcataaaaagagctttgcgattgaaacggaggcctttaacagtccggatcacacgcttgcgcgtttaaatagcagtcggcaggggctaacgaccgccgatgcgctggagcggctggaagactatggccgcaatgaagtggcgcgtgaaaccgcgccgccgttttttattcaattactgcaggcatttaataatccgtttatttatgtgctgatggcgctggcggcagtcagttttattaccgattactggctaccgctgcgtaacggtgaagagaccgacctcaccggcgttattattatcctgacgatggtgagcctgagtgggctattacgcttctggcaggagttcaggaccaataaagccgcgcaggcgctgaaatccatggtccgtaccaccgcaacggtactgcgccgcgggccgggcaatattggccccagccaggaggaaatacccattgaagagctggtgccaggcgatattattttccttgccgcaggcgatctggtgccggcagatgttcgtctgctggaatcacgggacctctttgtcagtcagtccattcttagcggtgaatcactgccggtagaaaaatatgatctcatggctagcgtgtcgggaaaatgcagcgatcgtttaccgacgccggataaaaataaaagtctgttagagatgggcaatatctgtctgatggggacgaatgtcaccagcggcagggcgcaggcggtggtggtggcgaccggcgaccggacctggtttggctcgctggcaaaatcgatcgtcggtacccgcacgcagactgccttcgatcgcggggtgaatagcgtcagctggttgttaatccgctttatgctgatcatggtaccgatcgtattgttgattaacggtttcagtaaaggcgattgggttgaagcctcgctttttgccctggcggtggcggtcggtttaacgccggagatgttacccatgatcgtcagttcgaatctggcgaagggcgcgattgccatgtcgcgacgtaaggtgatcgttaagcgtctcaatgccattcaaaacttcggcgcaatggatgtgctgtgtacggataaaaccggcaccctgacccaggacaatatcatccttgagcatcatctcgacgttggcggcgcggaaagcaatcgagtattaatgctggcgtggctgaatagcagcagccaaagcggagcgcgcaatctgatggacagagccgtgttgcgctatggggaagggcggctggcgccggcggaaaaagagcgtttcgtgaagctcgatgaattgccgttcgattttgtacgccgccgcgtatcggtctcggtggaagacagccgctatggcgataaaagcctgatttgtaaaggggcggttgaagagatgctcgaagccgcgacccatattcgtgagggcgacaagatcgttgaactggacgcgctgcgccgggaactattgctgacgaaaaccgaagattataacgctcagggttttcgggtattgctggtcgctacccgcaagctggatgacgcggcgctaagcgtgccgctcaccgcagctgatgaacaggggctcaccgtcgagggcatgttgacgttcctcgacccgccgaaggaaagcgcgggcaaagccattaccgcactgcgtgataacggtgtcgcggtcaaggtacttaccggtgataacccggttataacggcgcggatttgtcttgaagtaggcattgatgcgcacgacatactcaccggccaacaggttgagtcaatgactgaccgccagcttcaacaggaggtcgagaaacgcgcggtgttcgccaaactgacgccgctgcagaaatcgcgcattctgcagatgctgcagaaaaatggccataccgtaggttttctgggcgatggcattaacgacgccccggcgctgcgcgatgccgatgtgggtatttctgtcgatagcgcggcggatatcgcgaaggagtcctcggatattattctgctggaaaaagacctgatggtgctggaagagggggtgattaaaggacgcgagacctttggcaacattattaagtacctgaacatgaccgccagctccaacttcggcaacgtgttttcggtgctggtcgccagcgcctttatccctttcctgccgatgctggcgattcatctgttgattcagaatctgatgtacgacatctcacagctgtcgctgccgtgggacaaaatggataaggagtttttgcgtaagccgcgcaagtgggatgcgaagaacattggccgctttatgctgtggattggccccacgtcgtcgatattcgatatcaccacctttgctctgatgtggtacgtcttcgccgccaatcatgttgaagcgcaggccttgttccagtccggctggtttatcgaagggctgctgtcgcagacgctggtggtgcatatgttgagaacgcagaaaattccgttcatccagagccgcgcgacgctgccggttttgctcaccaccgccgccattatggccattggcatctatatcccgttctcgccgctcggcgccatggtggggcttgagccgctgccgctgagttatttcccgtggctcgttgccacgttgctgagctactgcctggtggcgcagggtatgaaacgtttctatatcaagcgctttggccagtggttctgatgacaaaaaggaggatgacgatgaatcgttcaccagaggatctcatcgcctggatgtttttactggccggtttgctggtactggcgctggcgatacggcaaatctttgaatagcggggggactatgcgcaaaacatcattagacccaatctttctccaggccgtgttgatgatggtggtgatagtcttactcaccgtctggattaggtagtttaaggcccggggcgttatcgctccgggcctaaagtccctgcggtattcctgcaacatggcaaatggtactttccaccacgtcgattaactcaataatggtagagcttcgagcatattcttcaggtttaaggtatcccagggcaggtgttcggcgacggtgaggccgaccggtttggcctgagcggcggcttgattgataagattaaccacttcggcaatcgtcagtttcccttcggcgacatcgccaaaatcgtgtacgcagcgccccggacgagcaaacagcactgctcgaaacagggccgggtcgaggacatcaagatcgagatggatggccaggtactcaatacgttcacgcgctatccactcgtcaatcgcctgcggattctgacgcagctctgatgggcttaaggtggcgataccgcgttcactaataaactgtttttccacatcgagcgggctatggatcccggcaatgagcgctttgccaggtgataatggctttctgaccacctgggttaattccgcgtcgccattgcccattaacgccccaagaacgtgggcatgggcatgtgggaactgctctggcgtcataacgtccgggtgagaatcaatccataatacccccaatttatcgccatatttttccacaagccaggcgaaaggagccagggagaccaggcaatcgccccctaaggtgacaatggtctctggctgatttcgagtgattttgtcttgtgcatcaagcaactgttcaacgatcgcccggcggccgacaattccatcttcatttgccagttgagcgtgtcctggttcggggacacagacctcctcgacaacgccttgcgcaggcggcgccagccaggacagcatccgggagccgaagaagtagggcggattgttgccgccttgccattgcggaaaaagcaaacgcagactggattgggtatttggcatcatggttctcctcatatttatcatcacaaatgaacaaacgttcattcattaataatgaggcgcactgttggtgatggcaagtaaaaacgggttatttaccctaacattaggctgctagccaaaaaccgcttgaagcaggtagaattgcccatcgccggaggtagttgaaatgttaaataattcagaaacgtaccataagctgattgtcgccgcggcggcgtgctttgccgaaaaaggatttaatggaaccagcgtgcgcgaaattgcactgcgcgcaggtattagcctcggcgcgatgtacacctacttcaagggcaaagatgaactcattgaggcgattatccttgaagagcaaaaaacggcattagctaagcatcaggagcgctttgaaggttcccattttgcgcagatttgcgccttagccgtttcctgtattgaagaagtggggtatccctcatctcaccagctgtgggtggaaattattgctgaatcggcaagaaagccggcgctgcggcagattttcgtcaatagcgacaggatcatgcgcgacggaatggcacagattattgctcaaggaattgccgctggcgagctcagcccacacgttaacgtcgaagaagcaacgctcaccatctttgcattcatcgatggtctgattggccgtaaagcgatgaatcccgcatttaccgtggctaaggatctgccgcattttgacaacgtcatggcgaccattctcaataaaaatagcgctagttaatcccatgcaacagtacgctgatttctgttttagcgccgtgatggctcaacgggcggcaaaagaaaatctcacccttgatgccgaccagctcgcgttggtcgccaacttgcaaatgctgagccagcagttattccggcagcaaacggcaatacaaggattgtacgtctggggcgaaccgggcgcgggaagagctttattctcgatagcttctttgccagcttgccgctgcgtgaaaagcggcgggtgcattttcatcactttttccgcgagctccatcagcggctgaacgccccttcggcgccgcggttgcaagaggtcgtcgcgcaaatgaccgacaactgtcgtctgctctgttttgatgagtttcatcttcatgacccggctgatgcgatgttgataaaggtgctactggagcatttgttcgcgcgaaatatcgtcttattagcgacctccaattatccccccgaccgtttgctggcgaatccgctctatcacgaacgttttttgccttccattaacctcattaaacatcatatgacggtaacggcgctcaacggcgaacaggattaccgcgagcgacatgcctcgctggagaatgatttctgccagggaaaactgttggtgcagccaacccccagtactcgcgcgacgctcggtttgccggatattgccccgcaggcgcaggctctgcaagtaggttatcgcaccctgcagacggcatctcggcaaggtgcttttctgcatttcactttcgaccagctctgccttgcgcctacctcggttatggattacctgacgctatgtgagcaacaccagaactggctcgtcgagaaggttccaccgttggcgcgagttagccctgcggcacagcagcgctttatcaacgtggtggatattttgtatgaaaaacagtgccgcttaattttaattaccgattgcgggctggaaacactggtggcggatgtggagctggatgatattcaacgcacctacagtcggttacagcagctcgctcgggaagcataaaaaagcgccactcgataatgagcggcgctttaacagagtaacctgccgccggttattcaccggcgggcaggggaattacagatcgaaacgatccagattcattaccttggtccatgcggcaacgaaatcagtaacgaatttctgttgcgcatcggcacaggcatagacttcggccagcgcgcgcaggaccgagttagaaccgaacaccagatcgacgcgagtggcggtatatttctcttcgccgctcttacggtcgtgaccggtaaacagctcagcctgttcatccgcggctttccatacggtgcccatatccagcaggttgacgaagaagtcagtgctgaggacgccgacgcgatcggtgaagacgccatgttggctgccatcgaagttagcgcccagcacccgcaagccgccgaccagtgccgtcatttccggcgccgtcagggttagctgctgcgctttatcgataagcagggtttccgttgacacgccgccttcgatgcgacggtaattacggaaaccgtcggccagcggctgcagcagatccattgcttcaacgtcggtctgatcctggcgcgcatcaacgcgacccggtgcaaacggcacgtttacttgaacgccggcagccgctgcggcctgctcaacccctacgacgcccgccagaacaatgatatccgccagcgacgctttacccgacgctttctggatggcctgtagcgttggcagcactttgctggcaatggcgttgaccggccattctctctgtggcagcagggccagacgcgcgccgttagcgccgccgcgcttatcgccaccgcggaaggttgaggcggaagcccaggcaacggagaccagttcgctaactgacagccctgaatccgcaatggccgttttcagcgtagcgatgtcggaggcggttggattatgggtcggtgccggtaacggatcctgccaaatcagatcttcttttggcacttccggaccgagataacgggattttggccccatatcgcggtgaatcagtttaaaccaggcgcgggcgaaggcttcgttaaaggcctgcggatcgttcaggaaacggcgcgagattttgccgaattccgggtcgaagcgcagcgtcaggtccgtcaccagcatggtcggcttgcgttttttattcggatcaaacgggtcgggaataatctccggcgcatctttcgcttcaaactgaatagcgcccgccgggctgcgcgtctgtacccattcgtatttgaacaggttctcgaagaagtagttgctccattgggtcggggtttgcgtccataccacttccagacccgaggtgatggcgtccgcgcctacaccgctgccgtaagtactgctccagccaagaccctgagattccagcggggcggcttccggttccgggccaacgtggcttgccggtgcggcgccgtgcgttttacccagcgtatggccgccggcgatcagcgcgacgatttcttcatcgtccatcgccatattgccgaaggtcgcacgaatggctgccgcggcggaaagcggatcgccgctggcgttagggccttccgggttgacatagatgagacccatttctgtggcgcccagcgcctgtttttccaggctttccgggtggcgatgtttcagccactctttttcatcgccccagtcaacatcgaggtccggttcccacacgtcttcacgccctgcgccgaaaccgaaggtacggaagccggcgttttctaatgccacgttacccgccagcatatacaggtcggcccaggagattttctgaccatatttttgtttcaccggccacagcagacgacgggctttatcaaggctgacgttatccggccaggagttaagcggggcgaagcgctgctgcccgcgaccggcgccgccgcggccatcgacggtacggtaagtccccgcgccgtgccacgccatacggataaacaggccaatgtagctgccccaatcggcgggccaccactcctgggagtcggtcagtagcgcgcgaaggtcggctttcaatgcggagtagtcgagctttttgaactcttcccgatagttgaagttttcacccaacgggttagaacgattggagtgctgattcagcaggtcaacacgaagttggttggccaccagtcacggttggcggtaccgctgccggcgctttgcttcggcgtcccggcgtggaaaggacatttccctgcggatgggttgttagtgggatcatttgacgtgctcatatcaggctccgtttgcttttgtgaatgccattacgatatacactgctaccaataagcgatatttgaatgagtctacggatttaatagcttttaccgttcaacaaacataattaaaaccagtgttttagtgtgtttactcggcgaaattcaaaaccacacctttaaacatagtcgtaacgcagcggtaaaggaaacgttatgatgcgttaaccgctacggatcgctaattgtttgagatatgacaattttactgcgatgaaaggattagcgttgccagtaaagcggcgtgccgaaaacgacggtaaaataatcaataacggtgcgtacattgagcgacggatgacgagtatgaggataaatcgcggcaatgtaagagggcaaatggttaatgccaacgctgtagtcattcatcagcgctactaatgttccctgcgccagcgcgtcgctcaccatccagtccggaaacaaaacaatgcccattccgccaatcgctgaagtgagaagggcatcggcgttgtttgagattagccgcggtgtttgcgggtaatgggtccactcttcttccctctggcgaaaaagccaacggttagcgccctgtgaaccgcgatacaccagcgtgcggtgttgattaagctcagaaggcgattgcggtgcgccgaaacgggaaaggtaaccaggcgctgcggcgaggtaatagcgctgggcgccaaaaacctttgcgtgatagctggcgtcaggcagggcgctgatgcgaaaaatgatatcagtcgcctggcgatgaggatcgacaaagtcatcggtcaggattaattcgtactccagctcgggataacgatcggccagtcccgctaaccatggcgcgatatgccgttggccaaagtagaccggggcgttgatgcgcacgagtccgccaggttgttgggcgcgatcctgtaattcgcgttgcgcgtgagcgaattgctcggtcatcccgcgggcatagtcagcaaacaggtttccggcctccgttggaacgaccgcacgggtattgcggtagaacagctgctggccaagcgcatcctcaagttgctggatgactcgtgaaatcagagaaggagaaacgccttcacggcgcgcgacaaccgaaaaactatggctgtcatacacggcgataaacagctggagggcgcggagattgatgttacctgtgtcggccattaatgcaaatcctgcaaaggtgtttgcaaaactatactattttttgcattagcgcgccgttctattctcttccgctcttaacaactgaagagtatttaacatgcagcgtgtgctgatttttttagtgattgccggcggaatggggctgtccgtagaggctggtctattggggccgctggcgggtcaggtcggtgatttatgggcaacaatgagtattttcgccattggcgcggcattaacgtttttactgatgcttttttttagcccgcgacaaagtccctcttttttttcgctccccggttggcaattaaccggtggtctattggggcccggttatgtgctgatattaacgattgttactccgacgatcggtatcgcaatgacgattaccggtgttctcgccggtcaagtatgtaagagtctgttaatcgatcattttggctggtttggtagcccgcggcgaaaaatagatcgccgccgggttattgcgctgttgttcattgtggcggcattagtgctgattgccgttgattgaggtgctgatatgaatatgttgatgattattttgtcgctgattggcggcgcattgctaagcgtacaggctgcggtgaatggccgtcttggcgtgcaagtcggaatattgcgtagcgcctttttgaccttttccattggcgcattggtgaccggtttattaatcgttttctttgctccgcagcagtcaatgacgctgctggatgtaccaaaatggcaactgcttggggcgttctgcggggttccctatattgtcatcatggtgctggcagtacagcgaatcggcacggcaacggcgacggtggcggtaatatttggtcaactcgcgatgagcttgctgattgataatttcgggtggttgggaaatagctctattgccttttcgccacaacgcctggcggcggtgctatgtttggcgttagcgctgtactttatatacgcgtctggcgtatcaggagcagttgcacctcctaaacggtcgggaaaggcgaaatggttgtcgaccgaacgggaataagctaatacttagacaccatgtgactggcgctaaagacagaatactgttggggagcatggtcaagtacgccgcgcgcctgggcattacccctatctggagataagttatgcctgaattagcttcattatcggcttttgccgcggtggcgttggggttagtgttaactcctggccccaacatgatgtacctcacttcacggtcgatttgccagggaaaacgcgccggctttatatcccttgctggcgttgcggtgggatttttcttttatatgctgtgtgcggcttttggcataaccgcgctggttttcgccgtaccctatgcctacgatgcgttgcgaatttgcggagtggcttatttgctctatttagcgtggcaggcgattaaacccggtgggcggccgattttcgcggtgcgcgatttaccggctgatagcgggcgtaagctgtttctgatgggctttcttaccagcctggcgaatcctaaagtggctatcttgtatttgtctttgctgccgcagtttatcactcccgggctcggtagcgtgctgagtcagtcgctaatacttggctgtacccaggtgctaataagcgtggcggttaacgggcttattattatgctggccgggcaggtggcgctgtttcttgggcggcgaccgggttggcaacaattccaacgttggctgatggcgacggtacttgccggaatggcggtaaagatcgcttttgaagccagaaaataatcgttactgcctgacaacgcgtttttatgcctttctctcgttgagaaaggcatctcacgttctaacatactgatacatttctgccagttcattagcaacctttcagtagggctaatgcgtcaatgaagctattcttcttcgcctttgttttgtgctttccagtgacgcaggtaaattgccgccaatggccctattgagagatgagatccgcgaccactcggcagaagagatgctgtttatccgccgcgccgttattgctttcctgttggtggtggtctgctttggggtgttgattttcaatctctaccatctccaggtagagcagcacgacttttatcagacccgctccaatcaaaacgacattaaaatgttgccgatcgcgccaagccgggggctgattttcgaccgcaacggtattccgctggtgcaaaatatcaccctgtatcgcctgcaggtgatccccagtaagattgccgatatgtcggcgctgctccaggcgttaagcccgattgtcgacctgacggcggatgatatcgccagtttccgcgacgatatgcaccacaatagccgctataaagaagtgacgcttaaatccgatcttaccgatgtggaagtggcgcgattcgcggtcaacgaattccgttttccgggcgtcaccgtcgagagctaccagcagcgaagttatccctatggcgcggaactggcgcacgttgtcggttatgtatctaaaattaacgataacgatttacaacggctggcgaaaaacggcgaaacagaaaactacgcggctgaccgcaatatcggtaaacagggaattgaaggctattacgagaaagaactacacggcaccaccggttatcaggaagtcgaggttgacaaccatggccgcgttgttcgcctgttgaaagaagtcccgccgatcgccggcaaaaatatctatctgacgctcgacctgcatttgcagcagtatattgagtcggtcctgaagggccagcgcgccgcggtcgtggccgtcgatccgcgcgacggcggcgtgctggcgatggtctccagccccagctatgaccccaatcctttcgttaaggggattggctaccaggcttacaaatcactgctcgataaccaggatcgcccgctgattaaccgcgtcactcagggattgtatcccccggcttccacggtcaagccgtatatggcgctctcagctctttccgccggggttattacgccaaataccaccttcttcggcgcgccaacctggacgcttcccggtactcagcgccgctaccgcgactggttaaaaacgggacatggtatgttgaatgtgaccaaagcgattgaagagtctgcggataccttcttctaccaggtcgcttttgagatgggcatcgatcgtattcatcagtggctgagcaagtttgggtatggacaaccaacggggattgacctgaatgaggagtactctggcgtgctgccgagccgtgaatggaaacagcgggtacataaaaaaccgtggtatcagggcgatacgatttccgtcggtatcggccaggggtactggatcgctacgccaatccagatggtgaaagcgctgaccaccttaatcaacaacggcaaggtacaaaacccgcatcttttatactcaatgaagcaggggaataaggtcgaacgctatcagcagccagccaatttaccgcaggtcggcgatccgaaatcgccatactggggggttgtccgcaatggtatgtatggcatggcgaacctgccgaacggaacgggatataagctgttccatacagcgccgtatcagattgcggcgaaatccgggacctcgcaggtatttagcctgaaagaaaaccagacctacaacgctaaaatgatcccggtgcgtctgcgcgaccacattttttataccctgtttgcgccgtatcagcatccgaaagtggcgatggcgctcattctcgaaaatggcggcggcgatggcgttgtcgccggcccgacggcgcgtgcgattctcgaccatatcttcgacccggcgaatgcgccggctgcggatagcgcgcaaagtaacgttccgcaggtcgaaagcgccgatgcgcagtaaccacttaagtgatggacgtcgtcggcgcgctatacaggattcgccagctgcggcgacggcgagttatctcacgccatagcgcgatgacctcatccagttgcagcttgttaacgtcctgcggcgttgctaccggtagatgatagcgctggcgcagggcggagagtgcggttgcgctggcgtcttgcgcttgaccgctctgctcagccagctgttgttgtaactggctgaactcagcttgcccacacagcgttaactggcggagaaaggttttacagcagcgtagcaggttactgatggaacggtctggcgactgcagcgccagcagcaggtcatcgcgatcggcgatccgctgataacggcagctcaccacgtagccaatctgctgttcgacccgcaggcgctggaagaattgcggctcgcaaagtagcgccagcagttgcagcgcggccagcgatgcccctcgggcaatggaataaaaactaatagcgcgttatccgagctggcgtgaggaatacgctgaataccgcggcgacagcccgccgaagagtgaagttcggcgttaaccggggtattgagcagcgtcaactgacgggcaacctgctgcgccagattgccgctgccgcccaccatcgccgccagccaaccctcttgcgccggggcgatagtcagatgttcaggtaattgttgcagtagctggcgaatcgcaatggtttcagacgcgaacgtcgtccccggagcggattgggctaatcggcgcatgagtgcggtgacgacgcgctccgctacgccgccggattccggtagctgtagggtaagctgccagttgccgtccaccgtttgccactcgccgctgccgccagcatggcgaagttgcgcgagcaagggacggatttgctggcttatcgccataccctgcgcctgactaagcacgctatagaatggcttgcgaacgatcagcgttggcgtttgattatctgcaatgacatgcagcagcgggctggtcgttggcggcaggtcaggcgctgccgcggtcgccgcctgcggatagaagctaaatgccagcggatcaatcacgactgtccgtggctgccagcggccgagcggcaaggtaaagccctgggttgccacgccatcgccagccgctattttgcggcacaccagcgaagaggctggcgccgtcagcaagctggcgcagaagcgggcaaagtcgacgggcggggaatcgggcgcaaaacccaatgcccgctgacgtagctgttcgagcggggagagtgcgttaaaacgcctctgcgccagcctgtaatagtgcaactgctgttcaggcgaggtgtggcgcaatgcctgcagccatcgctcgagatgctgattgatggcgtcgggatggtcgctgctaaataccagcgccagccagccgacgcgttcatcctggtaaagccagttcagcgcgacatcgtccgcgagcccgcattcacgcaacccggccagcaggctgccgggcgcttcatccagcaagaattcgcgaaaagtagtgacgttgtcacttagtgcaatgagcggacaccgccataccgccggttggtcttcaacggccagttggaggtccgcaacgttgctgaaattcacagacggcgcgtttgccggcggcagtccgtcagggaagtcagcggcaaaaacatgggccaattcggttaattcatcaagcgactgcggcccctgaagccatagctgcagatggctggcgacataatagcgctggtgaaactcgccgagcgcactctgcagcgcatgcaaatttccgcccagcgaatccatgctgccgacctgaaaacggcgaaaagccgcgggcgccgccatcgcgtgacgggctgcggcttcacggcgggagggatcgtgctgctggataagccggttttccgcatcgatgaccgccagttcctggcggatatcttcagtcaacagcagcggcgcctggagcgtatcccgtagacgggtgatgccctcggccagactactggcggcgacctcaaagaaataggcgctgtggcgggcaagggtggtggcgttgacgctgccgccctggcgttggatccacgccatcaaacgctcgtctgcgtgatagcgctggctgccgcgaaacagcaaatgttccagtaaatgggccagccccggcagggcatcggtttcgtgatggcttccggcacccaccttaaccaacgccgccgcacgcgtcgcctgcggctgatgaaccagcgttgcgcgcatgccgcctgccagttccacgatgcgggtggcgctggtcatcacaattcccgggttttatagatcaactgtgaacgggtgcggttacggaactgcagctggctgattttgatgtcgctacaggccgcttcgcgccgcgcttcgaggattttatgatggtgcggcgatttgctgcacaccgggtcagcgttatcggcattgccggtcagcataaaggcctgacagcggcagccgccgaaatctttctctttttcatcacaggaacggcacggctccggcatccagtcgaagccgcggtagcggttgaagccaaacgagtcataccagatcgattccaggctctgctccagcaccgacgggaactcgaccggcagctggcgcgcgctgtgacacggcagcgcggtgccttccggggtcacgctgaggaatattgagccccagccgcccatacagcctttagggcgttcttcgtagtagtccggggtgacaaagagcagattggtcagattaccgttagccgccattttatggcggtaatcagcaacgacctgttcagctcgggcgatctgttcgcgggtcggcagtaacccctgacgattgaggaacgcccagccgtaaaactggcaggtggcgagctcaacatcatccgcttccagctcgatacacagctcgatgattttatcgatctggtcgatattgtggcgatggaggacaaagttcagcaccatcgggtagtcgcgttcttttaccgctttcgccatcgccagcttctgctggaacgcttttttgttgcccgccagcgccgcgttaagcacttcatcgctggcctggaagctaatctggatatgatccagcccggcctcgctgaaggcgtcgagtttgctctcggtgagcccaatgcctgacgtaataagattggtgtaaaaaccgaggtcgcgcgcggcgcggataagctccggcagatctttgcgcgtcagcggttcgccgccggagaaacccatctgcacgctacccatggcccgcgcctggcgaaagacctcaatccactgttcggtggtgagttctttctcctgctgagcaaagtccagcgggttagagcagtaggggcactgcaacggacagcgataggtcagctccgccagtagccacagcggtggattaacggcgggtttattctggctcacggaagataatccacttctgttggtaagctatctgcaggaattcgatgacgtcgtcatcgacgccgccggcttccgggaaacgggcgttgagttcggcgattatttttgccgcgtcgcgttgaccatcgaccagttcgaggatcgcggcggcggtctcattcagtttcgccattccttccggatagaggatcacgtggctatcctgcgcagcttcccactgcaggcggtagccgcgacgaaaggcgatgattgcgcttttttgcatagttataccagtcgggtcgtgtgccaggccgccttgtcggtgaccgtatgatagggcgggcgctgcaacgcgtaggccatggtcatggcatccagcatcgaccacagaatgtcgagcttaaactgcaggatctccagcatccggttctgcttttccgcgctatcgcagtagatcttcgccagctccagcccatgttcgacgtcgcgattggcctggcttaagcggctgcggaagtagaaatagccttcttctttgatccatggatagtgctgcggccagctgtcgaggcgcgactgatggatttgcggggcaaacagttcggtcagcgaactgcacgccgcctcctgccagttggcccgccgggcgaagttgacgtaggcgtcgacggcaaaacgcacgccgggcagcacgtggcgctcgctgagtaactcatcgcggtttaaccccacggcttcacccaactgcagccaggcttcgataccgccttcctggccgttactgccatcgtggtcgaggatccgctgcacccatttgcgtcgggtgtgtggatcggggcagtttgccataatcgccgcgtcttttagcgggatattggtctggtagtaaaaacggttcgccacccagccctggatttgttcgcggctggcctcgccgttatgcatcgcaatatggtacggatgatggatatggtagtaggtgcctttttcccgtagcgcttgttcaaacgcctgtggcgatagggtttctcgtatctgcatagttagtcctgaagcgtgataggcatcccgtcccagctcacttcaattccctgttgcgtcagggccttgcgctgcggcgattgctcgttaaggataggattcgtgttattgatatgaatcagaattttgcgctttgccggaagtgaggccagcagcgccatcatgccgtgttcatcgccaagcgccaggtggcccatatcacgaccggtattgcgcccgacgccagcagcctgcagttcgtcatcctgccagacggtgccgtcaatcagcaggcagtccgcttttttcagccacggcaggagcgcttcgtccggttcgccaagccccggcgcatagaacagcgtctggccgttgcggcggttttcgataaatagcgctacgttgtggcccggcagcgggcgatcgcgaaacggcgagtagggcggcgcattgctggcgatggggacggcggtaaactgcagctcgggacaggcgtcaacggtaaaactattcagcggggtgacaggatggtgaatcaggccgccgttccagtgccgtaacatagtaaaaatgggaaaacccgtgctgagatcctcatgtacctccggcgtgcaccagacctgatggggacacccttcgcgtaggctcagcagcccggtagtatggtcaatctggctatcggtaaggataatgccgccaatatgcgtgccgcgcagcacgccttgtttgtttaactctggcgtgtgggcaatttgctggctgatatcgggagaggcgttacacagcacccactctttgccgttatcgctaacgataatggaagactgagtgcgggcggtggcctgaatcgtgccattgcgcagcccctgacagttggcgcagttacaattccactgtggaaagcctccgccagcggcggaaccgaggacttttataaacatgaagacggaccagataaaaaaacaaaatgcccgcacggacggcgggcggagcgattaacggttggaaatgtacagcgtcacttccagacccagacgtaaatcaataaaagcaggttttttccacatcgtttattcctctaaaaaaatgcgacatcaacgtctacggttgtgtcggttttgtgatggccatcaaatattgcccctcagggagacaaaggtcaaccggcaacatgtaagcatttaaccttatgtttacaatataacctattgttgccacacattttttaataccttttgccagttgccccaaagcagtttatccagcaccaattgttcataaccgctatggcgcaacgcgttgattagccgtggtaaaccgctcacatcgcccaattcgtccggcagggtgatgccgtcaaaatcggaccccaacgccacgtgatcgtcgcccataatgttaataagatagtcgatatggtgaacgatggtagctaatggggtgtcgctgtcgcgtttgccgtcggcgcgcaggaaagcgttgccgaaattgacgccgaccacgccgccgctgtcgcgaatcgcccgcagttgttcatcggtgagattacgcggctgcgggcatagcgcgtgggcattagagtgggtggcgaccagcggtgacgtcgagtgttgggcggtatcccagaacgctttttcattcatatgagacacgtcaatctgcatcttcaaggcattggcctgcttaatcagatcgatacctgccgctgtcagtccaggcccagtgtccgggctaccgggaaaggaaccgttaacgccgctgccgaagcggttcgcaatgttccagaacggaccaatgctgcggaccccggcggcataaaaggcctgcaggtcgcggccctcgccatcaaaacctccggcgccctcaatatgcgccaccattgccagtacgttatcctcgcggcagcgttcgatatccgccgcgctcagacataatcgcaagcgtccagcggagtgcgcgacaagttgtttcaggatggccagttgctgccagaggatagcgatcggatcccatcgttggctggcgtattgcggcgccatacgggcaatatattcctgcggtggcacgaatagcgcgaatagcccgccggcaaattcgccttgcagcatgcgcggatagtcgagatgaccgttctcaatcccagcaaagaaagcagttgaaggatcctcgcgatggtgaagccataaattgagcagcaggtcattgtgaccatcaaaaatcgccatagcgcgctccatctggtggttgtactggaaatgcctgacacggtaactgatttgttcgctgcggcaagtggaaattcacaacttagcaacaatcgccaaatctggcgtttgtatcacactgtatcaatcggcactcctcatacatggcgatgcaaaaacacgataaatcccacacatgctggatacacaggcctgattaactgttcacgtacttgcttaacgcttccagataaaaggtgaaatgaggatgaacagattatccgcaatccgtcatgtcagcgctacggcgctgtgtctctccacgctgtggtccgccagcgtgtgcgctgctgaagacgcaggcgctttcgacaaggtgcaacaaatcaacgccggcgatttgaatatcggttatgtcgatatggggccacgcgatggccaggcggtaattttgctgcacggctggccgtatgatattcaaagctacgcgcaggtggccccggcgctggcgcagaagggttaccgggtcatcgtgccgtatctgcgcggctacggctccacccgtttcctgtcggctaaaacgccgcgtaacggtcagccatcggcgatggcggcggatatagtgcatctgatggatgcgctaaatattaagcaagcggatttcgccggctttgactggggcgcgcgtacagcggatatcgtcgcggcgctctggccgcagcgggttaagtcgctggtatcggtgagcggatatctgattagcagccagcaaattggcgagaagccgttaccgccgcaggcggaactgtcgtggtggtatcaattctactttgccaccccgcgcggcgaggcgggctaccggcaaaatacccatgactttgccaaatttatctggcatcaggcttcgccgcggtggacattcacggatgccacgttcgccaatagcgcgaaagcgctggataacccggatcacgttgccgtcaccatcagcaactaccgctggcgcctggggttggagcatggcgaagcgaaatatgcggcctacgaacagcgactcgcgaaactgccggcgattagcgtgcctacaattaccatcgagggggaaaacaatggcgcgccgcatccggcgccggatagctatcgggcgaaattcaccggtaaatatgagcatcgggatttcaaaggcgcagtgggacataacccgccgcaggaggcgccagcggaatttgtccaggcggttattgacgccgatcgcttataagcctcaccacgccgcaagcgcagagttgcgcttgcggaaaagccgcatatgcttttcatgagcttatttttccgcaggagccgcctttggaacgtattgaccacatcctggttatcgatgacgatcgcgatatccgcgaactgatcgttgggtatctggagaaatcgggctatcgcgccagcggcgcagctaatggcaaagcgatgtggtctgtacttaaaaaccatcaaatcgatttgattgtcctcgatatcatgctgcccggcgacgatggtttaaccctttgtcgacagttgcgcaatgatggccaacaggatatcccggtgctgatgctgaccgcgcgtagcgaagatagcgaccgtatacttgggctcgaaatgggggccgacgattatctggtgaaaccgttcgtggcccgggagctactggcgcggatcaaagccatcttacgccgcgcccgcgcgcttccccccaatttacaaatcagcgaagccggcaggcttatcgcctttggcgactggctgctcgatacctcggcgcggcatctgatggacgagagtggcacaattgtggcgctaagcggagcggaatatcgcctgctgcgggtgtttcttgatcatcctcaacgggtgctcaaccgcgatcagctgttgaatcttacccaggggcgtgatgccgaactgtttgaacggtctatcgatctgttggtgagccgcctgcgtcagcgcctgcgggaggacgcgcgtgagcccgcctatatcaaaaccgtgcgcagcgagggttacgtgctgtcagtgccggtgtcgatccgcgaggctcgataatgaaagtgtggccggcgtcactgcagtcgcgcttaatgatgatgatttttctggctctgctgctcgctaatgccctgacgctatcgcttctgctctacgagcgcatgagcagcgcccgtagcgtcatgctgggcaaccttgaatacgatgtcgccaccagcgtggctatccttgatcgtcttcctgcgcaagaacggccgcattggttggcgcgtctggcgcgcggtaactaccgctatcagctttctgccggacaaactggcgactatcccaccagctggcgtacccgcgatgcggtacgttcgatacaggaagccctgagcggtcgttatcctgtgagtattgtcgccatccctggaccgcgcgaacatattcaggcccacgttaccctgcgcgatggcgcgccgctaagcattgacctgtggccaaagctgccggccatcgcacgttggctaccgctggtgctggtcgcgcagtttctgttactgctattttgcgcctggtacgccgtccgccaggtggtcgcgccgatgacccgctttacccgcgccattgatacgctgcaaccggctactccggctgcagggccgctggccgagaagggaccacaagaggtgcagcgcgcggcgcgcgccttcaacgcgatgcaaaagcgaatacaggaccatttgcaggagcgcgcgcggatcctggcggcgatctcccacgatttgcagacgccgattacccgtatgaagctaagagtcgagatggccgaccaaccggcactccgcgataagctgttacaggatctcgatagtatgacccgactggttcgcgaaggcatcgcgctggcacgatcggccgaaccgctggcagaagcgccgcagcggatgagtctcaatgcgttactggatagcatcgtctgtgattatgccgatatcggtaaagcggtcagttttcgtgcaggtaaaggggcggacgtcatgacgcttcagccgcaggcgctgcggcggatcatgagtaacttaatcgataatgggctgaaatacgccaaaaaggtggaaattagcctgagttatccgccgaatagcgatgttatcattcacgttgttgatgacggccccggcatcccggaaggagagctcaccgccgtactgcagccgttctatcgccttgagcagtcacgtaatcgcgataccggcggtaccggtttggggctggcaatcgccgcccagctcgccgggcagatgcagggaagtttgaccctgcacaatctgcaacagggcggtcttgaggcgcgggtacgtctcaatgccgccgctttgtatccttctgtatccattccaactgcagataaatccatatactaaaccgccgtttcacggacatatccgccatacaatcgcctgttgtaatgctgacgttgccatttcggcaacgttgcgaaggagaatgatcatggctgttgtgattgcatttttggccggtatgttgacgctgctcagcccctgcaccttaccggtgatcccgctggtgtttgccagcgtaagcgggcgtaagggacaactcatcctgttgttgttcggtatggggttgatgtttaccgctgtatcgctgctggccacggcggcagggggatggttagtcaatctgactatcgtcgggcgttggctggcgctgggctttttggtcgttgtggctatcagtttgctgtcaacacgcgttgcaggctggctcggatcgccagcggttgcgttgggtaatcaacttaaccaacagagctatcgttatggcagtgggctcgcttcagtgttcgccggactggcgattggactactttgggcgccgtgcgcgggaccggtgctggggcgatatttagcctggcgttgttgaaaggaaattcagtgactaccggcatcttgctgctttcctatgccagcggatgcgcgctgatgttgctgctattggggtggttcggcgcgcggctgatttcccgtttgcgcggtggtcaggtgataagtgggcggttacgccaactggctggcgtggcaatgctggccgcggtggcattaatcgccagcggtagcgatcgttatctgcagggcgccagcggtttaacccatcgtctggagcagcggctcagcgcgtttatgccccaggatcaccaacgggttcggctggagccgatcgttgcgccgcggccaaccagcgctatgccggaattgcaaggcggcaccgcatggattaatagccctccgcttaccaatgcggcgttaaagggcaaagtggtgctgattgatttttggacccgcgattgcatcaactgtcagcatacgctgccttatgtacgggcgtgggccaataagtatcgcgatgcggggctggtggtgattggcgtacatacgccggaatatccgtgggaacgatcgttgccgcagcttcgtgaagcggtcagccagcggcagctaaactatccggttgtcgcagataacaactacgccatctggaatgcgtttggtaatcagtactggccggcgcattatttcttcgacgcgcggggacaactgcgttataccgcctttggcgaaggtgattatgcccgtcaggagcaggtgatccaacaactgctgcgcgaagcgcggacgtgagggggaaataaaaaagccgataacagcagttatcggctttgcaggacacgcgctaatcagcagcgtcttatttcgccagcagttcctgggcggtgcgttcaacgaggctcagcaagaccttcacatcgtccagcgtcaccaccgggttgagcagcgtcagcttcaggcaggttacgccgttatgctcggtcacgccgacgttggcgcggccggattccagcagggcgtcgcccacgcgctggttgagcagggcgatcgcggcgctatcgctaccagccatttgcgccggacgtgagcggaacagcacgcttgccagctgcggctgcatgaccaactccagcgttggctgagacttcacgaattccgcgacgtttttcgccatcgttacgccatgatcgatgattgaagcgtactgtttcttgcccagtgcctcaagccccatccacagcttcagcgcgtcgaagcggcgggtggtctgcagcgatttggagaccaggttcggaacgccgtgttcttcatcaaactcggagttcagataggccgcctgataccgcatcagctcatagtggcgagcatctttcagcaggaaggcgccgcagctgatggtctggaagaactgcttatggaagtccagggtaacggaatccactaactccaggccgtcaaggtaattgcgatactgctcggacagcagcagcgcgccgccccatgcggcatcaacgtgcagccagatctggtgctccgccgcgatagcggcgatatcacgcagcggatcgattgcgcccgcatcggtggtaccggcggtagcgacgatggccatgatctgctcgccgttggcctgcgcttgcgcaatcttggccttcaggtcggtgacgtccatacgggcgaattcatcggttttaaccagcgtgaccgagcgatagccaagcccatcagcgccatgttcttctgcaccgagaagtgggcgttttccgagcacagtactttgtactgacgaatgtcgcccggaataccatcctgttggatggaatgcccctgacgggcgaagaaggcgtcgcgtgccagcatcaggcccatcagattgctctgggtgccgccgctggtgaagacgccggcatcgccagccggataaccgacctgcgcgcgcaaccactcgatcagcttcatctcgatgatggtcgccgacgggctttgatcccaggagtccatgctctggttggtggcgttgatcagcacttccgccgcctggctgataaccaggcttgggcagtgcaggtgcgccacacactgcggatggtgcaccgacaggctgtctttcaggaagtactcgatcgcacgttcaatcgccgcctggttgcccagaccctgttcgttaaaatcaagggtgatgcgctcacggagttcatcaacgcttttcccctgatacatttcaggttgttgcagccactgcgcaaccgcctggctggtctgggaaatgacctgctggtaagcgtcaatgcttgccgcggacccagccagaatcggattcaatttggacattgcggtcacttactccactcagaccggttttacgccggcggccagcagggcctgttcaaacttatcgaggaacacttccagctccgcgtcgctaatcagcagggacggcagcagacgcagtacgcaaccgtgacggccgccgcgttccaggatcacgccagcttcgaagcatttcttctgcagcagcgcggagagctcgccgtcagccgggtagcagcccatatgatcctgcgcctcgttcggcttcacgatttcgataccgatcatcagaccgagaccacgcacgtgaccgataaccggatagcgtttctgcatttccgccagtttgcctttcagccactcgccctgggcggcgactttgtcggcaatcttgttatctcgcaggtggcgtagggtggtcagaccggtggccatcgccagctggttaccgcggaaggtaccagtatggtggccaggttcccaggcatcgaactctttcttaatgcccagaaccgccattggcagaccgccgccgacggctttcgacatcacaatgatgtccggctcgatgccggcgtgttcgaaggcgaagaatttaccggtacgggcaaagcctgcctgaacttcatcgatgatcaacagaatgccgtgctctttggtgactttgcggatgcgctgcagccactcaaccggcgccgggttcacaccgccttcgccctgtacggcttcaaggataaccgcggcaggtttgcgaacgccgctttccacgtcgttgatcaggttttcgaagtagtaggtcaacgccttaacgcccgcttcgccgccgatgcccagcgggcaacggtacaggtgcggataaggcataaactggacttccggcatcatgccgttgaccgccgcttttggcgacagattgccggtcacggacagcgcgccgtgggtcatcccgtgataaccgccggagaagctgatcaccgccgtacggccagtgtattttttcgccagtttcagcgcggcttcaacggcgtccgcgcctgaaggaccggtgaattgcaggcaatactctttcccttcgcccggcaggcaggagagcaggtattcagagaagcgatcttttaacggtgttgtcagatcgagggtatgtaacggcaagccgctggtaatgacactttggatgctctgcagtacttcaggatggttatggcccagcgcgagagtcccggcgccggcgaggcagtccaggtactgtttgttatccgcatcggtcagccaaacgccttcggctttggtgatggcgagcggcaacttgcgagggtaactcctgacattcgattcgaattcagcctgacgagccaaaaaggtttcgttgttcgcgtccaataaatctgcacttaaagtatcaatacggactttatccgtcatcatatcactcccacaaccagcgttacgtttgaactctggttgaataaaaaggtttagaaaattgaatcggcattcataaagcgcgcacaatatatggctttttaaatccgcattcaatctttaatttatgtcgctattttgacgtcattattacatacaggagtgtcaatataattgactgatttaaaagctaaatttcgattgtttttaaaaccatggaaagtgtaattattagtgagaaagtctatatatttttattaccgcttcgctgaatgactgacggaaatacttccgtcagttttatggttacttaacgcagttcaaccgcataatttgctaaaggtgttacttttttcaccaacttgttgttatataaaaattgttcatacgcgtcataacgcggcttatctaacgctgccggatcggtggcgaacagcggcacgctctgtaaccacgcctgctggttcagttcggtattgagttccggatgctctttggcaaaccgctgccaggtttgctgcggatgcgcacgcaaatagctcactccctgctgtaatgcgtcgaggaattttttgattttaggggcgttgacctcagctttgtttgccacgatcaccagttcgtcgtaagcgggcacgccatagtcttccacattcatgaccaccggttttttgccctgcagtttgagttccagcgcttcgatattgcgataaccgccgataacggcatcgacctggccggccagcagtgcgctggtaagctggaaattaacgttgattagtttgatgctgtcaggggcgatgttggcgtgctgcgccatggtggccagcgtcgcctgttcaataccgctcaccgaatatcccacttttttaccttgtagatcggccggagatttgatgcgcggatccagcgcaatcacggtattcaacggtgagtggatcaaagtaccgacgcgaaccagcggcagcccttcatcggcgaagaagtggacctgtggttgataggtgatcgctaaatccgcctggcgtgcggcaaccagacgcggagggagcgccggatcggaaggggaatgatattgacatccagtccggcatcccgaaaggcgccaatctgttccgccaccataatgggcgcatgatccgggttgatgtaccagtccagcaccagggtcaacttttcatttgccgatgcctggccgcagaccagcagagtgaggccggccaacagaggtatacgcatatctcttccttatttgtctcttgataagttattccggcgaccagttgatcagccggtgcaaaaaggcgtctaccgccaaccacagcgcgatggtcagcagcactaaaatgaacaatgcggcgaagcagatatcggtttgcaggcgggcattggcattcagcattacgtagccgagcccctcggcggagccgacccattcgccaataatcgcgccgatggggcgacagcggcggccatccgcaggccggaaccgagtgcgggtagcgccgccatgagccggacatggcgcaactgagctccaaaggaggcgcccatggtgcgggccagatcgagatagtcgcgattgacccgttgcagaccatcaaagaaagccgaggtaacggggaagaagataaccagcaccgccatcatgaccttggcgctcataccaaaaccaaaccacagcaccagcagcggggcgagggcgaagaccggaatggcctggctggtcagtaccagcggcattaaccaccgttgtaaccgcggcgacatggtcatacatagcgccagcaccataccgagcgcgactccgagcgccatcccgctgagaatttcgctcagggtgacaagggtatgactggccagatagctacggttattccacagtgcttcagcgacagccgccggagaaggcaacaaaaaagcgggaatgccgctgtagctcgtcagctgccagagcaacagtaggccacaaaatacgctgctcccgcgcagtaacttgcccttcatccgtttgcccttaccagttgctgcagcaactgcgcctggcttgccagcagcgcgggatcatccggggcgcgaggcggaataccgcttaaatgatgactatcatcaatcttgcccgtcggcgagagcaccagcagccgatggctgaggcggcaggcttccatcgggtcgtgggtaatgagcaccacggtacgcccggtgagcaagcgcgcggccagggtctgtatccgcgtacgggtaagcgtatcgagggcggaaaacggttcatccatcagcacaatggggcgatcgtcatagagggtgcgtgccaacgccgcgcgctggcgcatcccgccggacagcgcggccgggcgttcatcggcgcaagaggccagccctacttgctcaagaagctcgttaacccgcgcgttatcggccttttcaccgcgcagcctggcaccgagggcgacattttcccgtacgttaagccacggatagagcagatctttttgccccatccacgccagtcgcgtagtgacgggaaggccatcgctggcgactacggttccgcgggttggcgtcgccagcccggcgataatacgcaacaggctggttttgcccgcgccgctggcgccaaggagcgacacccattgcccggcggcaatatcgaaagagagatcgcgaaagagggtccgtgtgccaaagcgcagacataaatcgcgaacgtgaatacctggtgccatcacgcctgggcctgcccggcggcgttcagtcccatctgccagaaattgccttccagccgggtagcggtagtgaatatgtcgctcagtccggcgaaccgggattccgcgccgcgctgttgccagagggtttccagcaggccgatcgccgcgttgacgccctgaagatagctctcgtcgccgtaattacggatccacgacgcgtaggggttatcgtgcaagttggtttgtgggttgtgcagcagaccgagcccgatctccgcatagcccgcgacgcagggcagcagcgccgccagtagatccaacgcgtcgccggagtggccgatatccagtacgtaacgggtgtagttgatggtttccatcgcttcgctttgcagggccatagcgtcttcattcagcccccattgctcacaatagcctacatgcagcggtagctcagcaaggatggcattcatcgatgcggcggcggcgcgcatctccggcaacgtgcgaagtttgctgaccagcagggcgtagctgcgagcgaagtggatcaggaacagataatcctgggttaaataatgacgaaaggctgcctgcggcagtgtacccgcggctaattgctggaggaaagggtgcgacacgtagcgttgccattcgctaccggcctgctcgcgcagtcggccgtaaagaccttgggtgaaagcgggaatcatcatgggacctcctgaaaatagggggagatccgggcgtgcagaagtgtgaacaggcaaaactgaaaactggcgaacatgccgacccgtcccttcgctggcatgacccagatcaggttcaaagggttcggcttttacgccatctcagccctcacgggacacccctcggttgcgacatgttatacgtcattcactttttgattacaacggcggcaaggtaaaaaacgccgataacagtgacaccgtcacctttaaggtgcgatggggcagatcgataaataacatttatcaatttgtgtgattaaccacgcttttttatccaaaaataagcaaactaaagatagggtaagttggcgaagaacaagggcttacgatatatttttagcacttaccttaatatccccttatgaatgcgtcagtgttggagaccgcatgaagctggcaggccttactcttttactgatgcttgccctcgcacctggcgggtctatcgctgcgcaacttttcgatcctgaagacggcatgctcgatatgagccagtatctccaggataacccgtacggttttttgccagtgccggtgatgattaccgagccggctatcggctacggcggcggtctgttcggtttatttctgcatggtaaaggctctcgcgaaggcgatcgctttattccaccggcgctaaccggctttggcggcggcgggacgcaaaatggcacctggttcatcggtgccgcgcatcgtcatacctggaatcacgacaggattcgttatttggttggcgcgggctacgccaatgtcaatctcgatatctactcgggcgacattgccggttttaacaaaaatgtggcggtgcaaacccataccaaaggttttggcggtttacaaaagctgttattccgcgtgggggattcaccggtttttcttggcgcctcgcaattctatgcgcacaccgatgtgaccgcggacaatcaggtgattaacaaggtgtggcagcgggtactggggaaaaacagcacctcttcggccttgggcgtggtggcggaatatgacactaccgataattttttctaccctaagaaagggttatcactgcagggcgagtaccgtttttaccgcgctcttcttggcggcgactatcattacaatcagttgtcgctggatggtaaatactttataccgctggcgccgaccttaaccctggcgctggcggcgaattatcagtcgctgactcatcatgacaagcatctaacgccaatggcccggccttacatcgaactgcgtggcatctcgcgttttcgctatcagggcgattatgtcgccgttgcccagacgcaactggcctggcaatttgcgccgcgctggatcctgcagggctttgtcggcgtcggtagcgccgctgaagaagcaggggcgttgtggcagcaaaacgaagtggcgtggggcaccggttttcgttatctggtcgcccgtcagtatgggttatttaccggcgtcgatgtcgccttcagcgaacacgaacaggcggtctattttaatgtgggttccggactgtaaaggtacatataaaaatgagatggaaaacaaccgtcattacgctgctattgacctctggcgccgtgtggaatgcctgtgcggcggaaagtgacgacagtgatagctactttcccatctggggcgacgaagcccgcgcccgcggttattccattccgctgccgtttggcgtcaatctcagctatatgaatatgcgccaggatattatggtcgacagcatcaccttttccggtctgaagctgggtaaccatccgatccccagcgacatgttcgccatcgatgccggacacacgcgggagaagagcaaaaccgggaacctgcgtctcgatatgtgggtgtttcccttccttaatgtctacgggattctaggccacacccgcggttcgtcggtgtcgaatgtgtcggtcgatgccgacccgacacaataccgcggtctggatcgcatcatcgccggcgcggtgcataacctcaaccaaagcggcgagttgcaaaacatcgattttgttcttgatttcaaaggtactacctggggtggcgggttcacgctggctggcggctatgagaactggtttgccctcgtcgatacaaactacacccgcaccgatttcgatattctcgacggcagtatctctgccgtgacggtgtcaccgcgcgttggctatcgctttaacctccaagggatttctggtccttcgcatctcagcgtgtgggtcggcagtatgtatcaggacgtgcaacaggaatttaaaggcaacctggccgatttgcatatgccgccacagctgcagccattgattgccgcggtcaataaagacggcgacggcaagtttgatgtcaaacagaaactcacttcaccgtggaatatgctgatcggcgcccagtacgaaatcacgcgtaacttcaacgttctgaccgaatttggctttaacgatcgcaatagtttctttgtcgccggtgaataccgtttttgacttaacggcgcctggccatcggcgggtatgatgcgcgctgttttttgtcatggagaacgcttttgatgcgtaagagtttgtggtggttattggcggctgcttgttcggtatttgcccaggatccggtattaccgacgattcccgttaaccatgtcagcccggtagtggggaactatcgccgccggaatcactgcgcccatgctgcgccttcggtttcgatctgcgggtacgcgccattggcgtgccgatcccggtttatcagattggcaatgtgctgacgctcgataccttaggtgagcatcattacaacgatagcgcgcttggcgcggttaaaaatctgattggcttaagcgatgagcacaatggcctaatttatacccgccgcggcggttttattgatattgcccatgttcgtgataccgctgattacaccttttatttattcagccgaatttacccgacgctagggcagccaggacgcatcttttatagcgaggagctgggcgtccgccgcgtccagctaaatgcctttacgccaccggcttcaatgccgcagcgatatacgattgccgcctggcttgctggccatctggccttcgaaattgcgcaatggcatgagatcgcccaatggtatggtttccagtcggttccgggtttttcagaagaaatttccgctttttcaccggaggatctctattccaatctgcttggcgcgcgtctggcgattaacgttattttgcaagggcaagcgggttcagtcgatgcttataaccgggcgatggaagcggcgttaaaacaggcgctcgtcaaactgttggtcgcgccgcaaagtgagactgaacgtatgtttcgcgagattgacggtgactggtggaacagtaagcgcagggtaccggacaaattcctggtactgaagcggaattacgatctcagcgaaaatcgcctgccaacgccggttccttttgaacgcacgccgccgtatcgtctgacgatgccaaaggaagttgccgggtttacgctcgctgaactgggtcaactgcaaatccacccagggcaggatctgcagtcgctgccagcgccgcatgatttttattctccgcagcagttccaacagctcgctgataaagcgcagcaggcggatgccgttcagctgcagcgtattgaaaaataactaacgattggacgctgctggctatactcaatcaaacgaattcccccgtcattgattgaggtagcatcagactatggtatttgtcgttccgcgcgcgtactggctactgctggcggtgctattagtcagccaggcaggctatgccctcgacggcagtcggctaaagcagcgtgcggacgcggtgctcaccttaatgagttataccgtggtacctgacgttaccgccagtgacctgaatattggttcaggcgccaatgacaaaaatgaactgaccatcacgcaatttggcggcggcgccaccatgagtgaggattttccgctctatctggaaggaactatgggttacagccgctatgacccgcaatttgtggtcagcgatggcgaacaaagtcgtaccatcccgaccaaatggaacagtctgaccgcgaccggcggcgtcggctgggactttccgttgtatcaggaccgatggggcggaaaactggtattacggcctatttttactatgatgctgggcaccatggccagcgatgcgcgcctcggtcgttgggccctcgaacgtaaaacggatgctgatattcgcttcctcgatggtgggcgactgaacgcttatgggttgggcgggtcgctaatgctcgattatgagctgttttccaaaacgcaggatattgacatagaagcgcgatattccgcgatgaatttgcaaaccttcggtaacacatcagaagcggtacaagggcaggccagcgccgaaaacctgggtatctaccttcgtcgacgcgcgccgatagccgactggacgctgctaaaaagcccggtgcgctacgtgctggaaggcgctcatactatctattttggcgaccagcgcggtgaactaggctttgatagcttaagttccctcggcattggtctggagctcgacagcagccagtatccggtatttatcacccgcacccgactggtggcccgctacatgttcggtaataacaccgaagggtacggcctcggtttagcgatgagtttctgagtgatattacttgtttttgtggttgcgctattttttttcattttgttggcaatattttcttcgctgattcgtctacctcgatacatacattttaatgaggtaattgacgatgagagattttgaacgacacgggcatcatcaccagggttttggacgtcatagactggcgcgaccgctgattattggcgcggtgattgttgtggtactgagtctggtcgtgatgtcgctatggaacgcattgctgccagctatcttcggggtgaaaagcatcggtttctggcaggctttgggattactggcgctgtgccgtatcttgtttggcggtttaggttttcatcgcggcatgtttggtatggcgcaggtgcgtcgacgcatgcatgaacgctggatgaccatgactccggagcagcgagaggagtttgctcaacgttttggtcgccacggacatcgcggccgctgcggctggcatgaacgtcgcggcgggcaaccgactgacgataacccatcggcgaaaacgccggatgccgagtgaacgaggtaaacaacgcgatggcgggggaatcacggctgctgaccgcgcttgctgcctgccgttcgcgtctgagcgcgtttattcgcggtagaaccgccgtacgtgatgatgccgatgacatcctgcaggaagttaccctgcaactgatgaaggtcgagcaaccggtggagaacgttgcggcatggttattccgggcggcgcgaaatgaaatgaccgatcggtcgcgtaagaagcgcgaggtgccattatcattcgacactgatgaagatggcgatggcggctttgccgaggatgagctggcggaaacgctgtttggcgtcgcgcaaacgcccgaggaagcatatcttaaagaactgctgtgggaggcattaaccgatgcgctggcggagctgccgccgctgcagcgtgaagccttcgagaaaaccgagctgcagggctatagctacagggaattggcggcagagagcggcgccagcgagcaggcatggctgtcgcgtaaacacaaagcggtgctgtttctgcgcagccgcttgcgaacgctttacgatgagcttaccgcaccttaattcatgcccggcggcatatagcgccgggcttattttatccgtattcctataacatcgtcgccagccactcggcgaagacgcgcactttgcgcgagacatgacgatggggataaataagcgataacttcctggagggaaccggattattcgccaggacttcaaccagctcgccgcttttcaaccagggttgaaggaaaagatccataccctgcataatgccgaggccagccaaaccggcggcgatatacgtctctgaattatccaccaccagttttccggccagcgcaacaatctgcggcccggagtcagtctggaacacccagcgcatggtctgatgattactgttattcagccagttgatcgcctgatgatgctgcaggtcgtcaagggttgtgggaacaccgtatttcgccagataggccgggctggcgcaggttttcataccgacggtaccgagatgacgtgcgatatagtcaccgtcttcaagctcgccaatgcgcaggacgcagtcgaggccctcgcgaagcatatcccgccggcggtcggagctgctcagcacaatttcaatctccggatgttgctgataaaaggcggggagatttggcacgaccactaacttcgccagggcgataggcatatctatgcgcagttgaccacgcagcggacgctgcggggcgaaagactctataaggtcatcggcctgcgccagcaggggtttactacgacgataaaacgcctcgccatcaggggtgaggtggatctgtcgggtggtacgctgcaggagccgaacgccgcagtgctgctcaagctgctgtagcgctttagtgaccgccgggcggtggatctgcagattctcggcggcacgcgtaaagctgccagactcgatgatctcgatgaaaatcttaatagattcaaaaagatttaagttcatttgtgccaatgtgctccgatgacaacatggtatttcgccttgattattacttatttaataacagtgaaggataacttttactatttttccaaacaataaagcggcctacagtgtcgtcatcccagcgctaagcgccagaaaacacactaaggaagacgcatcatgcaaaaccgttctgttagccatattctcggtattgaaaaaaacgtcattcaggggccgctatcctggctgaccgacgcccgattagtcgccgcagtcagtaatgccggagggttgggcgtattagggccgaacgcaggtttaaccgcgcaaaccgccgtctcgacgcctcaggaaacggcagaaaagatgcgtgaagagatccgtaaaacgaaacgactcaccgagaaacctttcgctgtaaatctcattccgacggttgaaaacgatatctggacgccgccgattgtagaggtagtcaaggaagagggggttaaagcagtggtttataccggctatggtcaaggggctatcattccctcgctgtttgccacgcttaagcaggccgggatcaacattatctatcgtgatattaacccgacgccggaaaacagccgagaagctgaggagatgggggccgatgttatcgtcgccaccggcttcgatgaaggaggcacgcttccgggaacggcgctagggacattttcaatcgtgccattgattgtggatgcggtgaagcgggtgccggtgctggcggcggggggattaccgaccggcgtaccgccagggccgcccacgcgctgggcgcgcagggagtatttgccggctccgtgtttatcagcaccaccgagagccgcgtgccacaatcggtgaaagagatgatcgtgcaagctaacggcctggatttgcagctatttcgcacattgcctgattactatcgttcgctgccgggtaaattagccgccagactggtggcgttagataaatccggcgccagtaatgaaaccattgccgcggaaatgggcggtttacgcggcctgcgaattggtatgctggagggcaacactgacgaaggctacatttcactgggaaccggcatcggcagtattcagcggatcaagagcgtagcggaagtggtggaggaactgacggtttaatctgccttaccgcgctctcatgcggaaaacagaaactccccgtttgcgacaacggggagggtgattagccggaattagctaccccagcgctgctgcagatactgaaccgcctgctgggtttgcggctggttaaggttgttttcacgaaacagaatcgtcccctgaatgcccggcgtggtttcattgaggtctatctgttttttcagctccggcacgccgccgtcgaccatccagtctggttcattttttgacggctcgccgactttatacagcgccacgccgatatagagccgggtgtgagtgggtttcacgacatcggcccaccacttagcgagcacatcatagcgcgcggcgtcgcgggcgaagggccagtacaactgcggcgcaatataatccaacagcccttgttgtacccagctgcgggtatcggcataggactcatcataggccgccgcgccgcgggtgtcagaaccggccggatcgtgggagcggttgcgccatacccccgccgggctgacgccaaactcaacctgcggattgagtttcttgatggtctgtgagacctgcgctatcaactgttgggtgttgtgacgccgccagtcggctttcgaagcataaccctgtccatatcgctgataggtttgattatcgttcagcgtcgatcccggcgtctcagtatagaaatagtcatcaaactgtacgccgtcgatgggatagttttgcaccacttccgccacgatactggtgatccagtcacgaacttccgggatcccagggtcgagaacaaaacgatcgctggcggtgcgtatccagttacggtgtaagacaaatacgctggcgggaacctgagtcagggtgtggttaagttcggcgatggtggcgggtttggtattaaccgaaacacgatacgggttgaaccacacgtgaactttcatcccgcgtttatgcgcttcatcgagcataaactgcagcggatcgtagccgggattttcgccaattttgccggtcagcatgtctgaccacggcaagatgtgggaatcccacagcgcggtaccatccggtttgacctggaagaagacggtattgatgcccaggcgttgcagattgtcgagcttggcaatcaaggccagcttttgctgactgatgcggctttccggactgctggcgataattgaacccaccggcggccagtcgagacgggaaaccgtggtgatccagacgccgcgtactggctgctgattttttaccgatttttgcgtaacgggcggtttgctggcggttaccagcgattttggcgctttacttgagcaagtcacgagcagcagtacggcggcggcaaccgcgccgagccgggtcatgctggtgacggagaggaggcgacgagaagcgataatcattactcccgtaggcatgtagacgcttgaaaaatcacattgtcttatgattcgcaggtgagggcaaggtgtgtaattggacggagaaaaattactgccatgttgccaattaggatcgcctctaacatccatacataacagtatcctcccagtgatttcctgacaaaaaagcagaattaacctggataattagctggtcggttgtgttacaacatattactaaacgcacagctaaggagaatccgatgcgaaaaatattattgctggccgccgttttgctggcatcatccgcaccgatcgtcacccaggccgaggagattacgcttttaccggctataaaactgcagattggcgaccgtgattcctatggtcattactgggatggtgggcgctggcgtgacaaagactactggcatcgtcactatgaatatcgtgataagcactggcgaaagctggagaaaaagcagcgaaaagcctatgagaaaggttatcgtgatggtcgcaaggattataagaagcgcgaaaaagagtacaacaagcaccacaaacaccatcatcactaaataagattggagccattatggctccaatctgctattaccttctgccttgtgtctgaaatattgtctgataatgtcttcatcgcagaagcaaattaccccatcaatctcccttttcagaatgaactaataatattgcaaacgcctaccaacattagtgggggtaatatgcgtgtaaaaatttttaggataattccatcttttcagtgaatgaaaaatccgatttataaaactgtatattatattcattaaatcaatcagttaaatttcactttcttttgtatggtttttgcgattacacttttccgccgtcagaaggttttttcagggatttcaccattataagattagtctgaaaaaattaattccgccaactgctcctgataatggggcgaaattgcgtgttgaattgactcgatcgatctgtaaaattgtgtggtgatagttaatgaaatgtaataaagggatccactacggtgatgattcgtgcggtagctatgcctatatcacaccgggacctcttttacgcacagtaattaaggatattcagacttgttattcaagcggaataacccttaagaaaataatagcattgcaatggaaaagcatatgaaaacgcgagtgtttttagccgctatgattgcggtttcactggcagggtgcgaagcgccgccgaagccgcaaattaccgatgacactattgaaaccacacaggttaacggcgtcaatttgactcatcgccatattgttgttccgccaacggaatttaccccgattaacgcagaatatcgcgcgctgtattccgccgcggtaatgagccaggccggttatggcggcaaagtgattgtgcaattagttcccggagctaattatatcgcgcttgggcaggcccagggcggctggatagcgttagctaacgaaggtcaggaaaatttaattggctatgctccggccaatgccgttgttaaaagtgagctgtatgataaaacggtccgcgaacagtcgaagcgcccgaaggcgcgtaagaaagcgacctgcgtgagcgtcgacggaaataccaaagcctgcaaaaacggcaataacggtacctggattctggattaatcccgcctttacgagcgacaccgtatgaataataactctcttttacgccaggtcatgctggcgttttatttgtttctttttacgttggttagtggatgtggttcgtcttcacacagcgaccctgcccgatacaatcttcagttccaggcccacccgcaaattaacagttctgcgccattaaaggtcagagtgttagtgctgaaatccgatgcggaattcatgtccgccgatttctactccttacaaaataacgcgcaaaaagttctcgccggcaacttgcttaacagcgatgaatttttcctgatgccggggcaactggcaaaaaaacttagcgggcaaagctcgccggaggcgcgatatatcggagtaatggcggaataccaatctctggatggtaaaaagtggcgcatttctcttcctctgccaacgtctggcgaaacccctttttggcagttctggaaactctctgcagatcagctgcaagccaatttatatcttgacgttaacgggatccgcgtcgtgcagcaatagcgcgagccctaacaggaaatttgtatgaataaagcagaaaaggtggtctggaccgagggtatgtttttgcgtcctcatcactttcagcgggcagaaagctacctgcaaacgcaaattcgcgaatggggcggattacagcgctcctggctgtggggttttcttgagattgaacttgatgatgcgatgctgcgtcagggctgcattgccctgagctatgccagcggtctgctgccggatggaactttcttccagtttcgcgatgctcgtcagggcccggcgccgttacagatcccggataacgtcacgggcgaaaaagtcgtattggctttgccggtacgccgcggcggtcgggaagaggttatcttcagcgaggagaaagactcgctggcacgatttaccgcgtttgaacaggatgtggaagatgacaatgcgctgtcggtcggcgatgccaccgtgcagtttgcccgcccgcgactcaccctgatgctggaaaaggatttgactgccgagtggacggccatcggcgtggctttcatcgccgaaaagcgcaacgataacgccgtaaaactcgataatggctacatcccgccgatgctcaacggcatcaatcatcctttaatttacgcgatgatcaacgacttgcatggtctgctggcgcaacgcagccagcaaatcggcagccggctgcgacaaccggggcgttttaatacttccgaattaattgagttcactctacttgcgctggtcaatcgccatctcggccatctctcacatctcaaaacgctaccgttagttcatcccgagtcattgtggaatagctggctgccgttcgccgccgagctgacgacctggatggcgcagcgcggtccggatgcggcgctgccgatttacgaccatgacgatctcgcgagctgcttcggcaaactgatgctgttgctgcgccaggggttatcacaggtaatggaagacaacgccattcaactgccgctgatagaacggtcgcatgggctaaacatcgcgacggtacccgagagcagcatggtgcgtgatttcggattcgtattggcagttaaagccagcgtaccaggtgatgttctgcaaacgcacttcccggcgcagatgaaagtcgcgccggtgagcaaaattcgcgatctggtgcaactacagcttccgggtttaattctgcgcgctatgcccgccgcgccgccgcaaattccgtggcatgccggttacaactactttgcagtcgagaagggcggcgagctgtggaacgacatggagaaatctggcgccttcgccctgcatctggcaggcgagttccccggcctggatatggaattttgggctatccgtagcccgtcggaataagaaagcgagcgttgatgatgcaggaacaacaggccgctgccagccatggcgtaagcggcaataatcccctggtgacggccgccaacccattgctaaatgcgatcccccagatccgtcattcggtatctcacgatgaccaggccggtttgcgccagcgtttgattgatgaaatccgccgttttgaagtgcgcggtcagcaggcggggttaccctacgaagtgatagtcggcgcccgttactgcctgtgtaccgcactggacgaggcggcggccttgacgccatgggggagtagcggcgtctggtcgggcagcggtcttttagtgacctttcataacgaaacctggggcggggagaagttcttccagttgcttgcgcgcctgtcgcagaatccgcgtgaacacatcaatctgttggaactgatcaactactgcttattgctcggctttgaagggcgttaccgggtaatggataacggccgcacgcagttggaaaccatcaagcagcgcctgtggcagatgatttgcggcgtacgcggcggttacgcgccgccgttatcggttcacggcgaggatcgcccggtgctgcgtaaactgtggcgtccggtggtgccgctgtgggcctgcgtcgcgctggcggggttcgccgcctgtctgttctatatcattcttaactggcggcttggcgatgccaccaacccggtgttggcgaaaatttaccagacgccgttgccggaagcgtcgattgctcagccggcggaaaaattgccggcggtacttaacctgcgaggttttctgcgcccggaaattgccgaagggctggttgcggtccgtgacgaagcggaccgcagcgtggtgatcctcaaaggcgacgggctctttgcttcggcctcaacggtggtgcgcgatcgctacgatccggtaattgaccgtattgcgcaagcgatgaacaacgtcagtggccgcattctggtggtcggctatagcgataatgtgcctatccgcagcgcgcgctttgcctcgaactacgagctgtcgctggaacgcgcgcgatcggtacaaaaacaactgcaaaatcatctgacgcagcctgaacgcgtaaaagccgaagggcgaggggaaatgaaccccatcgcgccgaataccactcctgagaaccgtgcccgtaaccgccgtgtggaaattactctgctggtgtcgcccgataatacccgggctgagctgaacggattgccccaaggaaattaaggatgctgactcttctgctttccatactgaccaaccggctgctgtggggttttctcggcgctacggcggtggcggccgtcatctggatgattggcccgctattgtcgattgtcgatacccggccgctggaatcggaacaaaaccgcgttatatctattgcgctggtgtacctcatctgggcgcaaagccacattctgccgcgcctgtacaacgcctggctcaaccgcaagctgatggataacctgaaagaagaaacaccgaagggcaacgatccgcagcagcgcctcaatagcgaagaccagatcctcgccgatcgctttgatgaagccgcgcaaatgttgaaaaaagcgcacttcagcaaaaccggcaatggtcagtggacccagcggtttagcacccactatctgtatcagctgccgtggtatgtgattattggcgcatccggctccggtaaaaccacagccttagccaactccgggctgcagtttccgctggccgatcgcttcggaaaaacggcgttacgcggcatcggcggcacgcgtaactgcgactggtggtttaccaacgaagccgtgctgctggataccgccgggcgctataccacccaggagagcgagcaggctcaggatgccagcgagtggctgaagtttatggggttattgcgtaaataccgccgccgccagccgattaatggcgttatcgtcacggtaagtatctccgatctgttaacgcaatcgacggaggcctcgcggcagcaggcggtaaatctgcgccagcgtctctctgaactacatgaacaattgggtattcgtttcccggtgtacgtactggtgacgaaggccgatcttcttaaaggcttccgcgcctggtttgccggttacgacaaggcgcagcgcgatcaaatctggggcttcactttcccgtgggagcaggcaagccttgctgacttcgatctgatgggccgctttacccaggagtttgcgctgctgcaacagcggcttgaagccgggctgccggatacaatgctgcaagagcatgatgccaaaacccgcgccgaagcctggctgttcccgcaagagtttgcggcgttgcggccgttgttagccgattacctgagtaccgtctttgcccgctctaactttgaaaccgagttttcgccgcgcggtatttatttcgccagcggcacccaggaagggctaccgttcgaccgcgtgatgggcgaactcaatcgcgcgctgtctctgccgcagggaaatgaaaacgacaactgggactcggtcagtaaagaagcgccgatccccggcgccaagggccagagttatttcattaaaaacctgctgcaaaacgtgattttccaggaggccggcatcgctgggcagaaccgctggtgggaactgcgtaaccgcgcggcgatctggtcaggctatgcggcgctcgcggcgctgttaattatttcatgcgtactgtggctgaccagctacggcaaaaacaaggcctacctggaagaagtctcggcgaaggtgccgccggttgagcagcagagcaaagcgctgcaaaaccctgagcagcgcgatctgttcgccatgctgccgctactcaacggcctgctggaattgccgaagagcgcagattttgacgtcaacgacccgccggttagccgccggatggggctctaccgcgggaatgatgtcagcgacgcctcgcagacgctttaccaaaaagcgctgcagcaaatgctgctaccggatgtcgccatgcgtatcactacctggttacgcaacgacaatggcagtgacgccgaatatagctacgaggcgttgaaagcctatcaaatgctctatcagcccaagcagtatgacggcaagtttttactctcctgggtgatgcttaacctgcagcgtaacctgccgcaaaacgtgacgcaggcgcagctacgacagctggaagggcatctggtccagctactggaaccgcaaatccagtcctcgccgtatgccaaagacgatgcgctgatcgcccgcgaacgggcgttgattaaccagcaaccgctctcctcaagagtgtatggtcggctgaaacgtctgcttgagcatgatgacaatctgaaagcggtatcgctggcgacgctcggcgggccgcagagcgaactggtgttctcgcgtaaaagcggtacaccgatcgcagaaggcgtgccagggctgtacacgccagatggctactggcaggtgttcaataaacagatcgataacgtgaccagcgcgctgcatgaagatgatatctgggtgctgggcgccgccagcgcgtcggaagataagcagcaaaccgataacgccgtccgccagctctatatgcgtgattttatcgccaactgggatcgtttccttgccgatattcagctcaacaatagcgccgatctgtcatcgcgaatcaacaccgcgcgcctgctttcagccagtaactcgccgctgcgccgtctggttatcaacctgagtcaggtgctgaatctggcgcgcgccgagccggatagggttaaaagcgaaagctcagccgagcagggcaaccgcgcgacccgaacgctggaagcgcttttccgccatgatgagggcgcagcaacccatggcgcggcgcttagccagaccccggaacagctggtaacggaacactacgcgccgctgatcgagctggcgcagccgttggaaaagggcggcaaaacgattgtgtttgacgacttcctcaaacagatcgatgaactttatcgctacttgaccgcggtacaggatgccgccaacagcggtatgcaaccgccgggcggcgacgcgattagccgtctacaggccagcgcagggcgcttaccgggcggactgcaaaccatgttcagcaaaatggcggtcggcgccagcagtgatacccagcgccgcgatctcgataacgtacgtaaacggattaacgtggaagttggcggtttctgccgccaggccatcgccgggcgctatccgctggttcgcagcgccagtagcgaagtcacgccggacgatctggcgcgtatgttcgcgccgggcaccggcatgatggataccttcttccgtgacaacctgaccaataaagtcgataccacgcaatcaagctggcgttttatgcccggcatcgatggcaaaacgttgccgggtagtgaagggttattaaggcctttccagcaggcgcaatcgatccgcgacgcgttttttgccaatggcgcgaccacgccgtcatttaaagtgacggtgcgcaccatcagcatggacaaccggatcctcaacctgacgctggatgttgatggccagcagttgcgctatagccacggtccgcaggcggtgcaaatgatgagctggccggggccgggcggcaccaatcaggtgcgtatgcaactcggtctggccgatggtaccacctcgacgctggtggccagcggctcatgggcgctgaaccgcttctttgataaagcgcgcaccgcgcccggcagcagcagtttgagccgtcaggcaacgtttaatgtcgatggttaccaggtcacgctggagtttgcgccgaacagtatccgcaatccgttccagcttccccgtttctcatgtccataaccgcaaggaaagccgaatgactcacgcccctgcgatgagctggtacgggaaactccccagtaccggcgattttttacaacgtcgatttccggacatgctggttcgccagtggtcgcaatggtttcaggttgggctgatggcctggcaacaggagcaacagcgtagcggcgaacgccagttcagcaacgcgccggtatggaactttatcgttccgccaatgttgagcgggcagatggtgcagatggggtgtctgatcccagggcgcgatcgggtaggccgccaatatcccatctgcgcgcaaatggccttcaacccgctggagtggtcgccttcaatcctcactcaggccggagagtggtatcagcaggtgggcagaacgctgctgcatgcggtacgcaatggcttttccgctgaacaacttgaccaggcgctactcgctattccggcgccaaagctggtagcggcggaaaagcgttcggaaatactcgacgtgattggttatcagcaagatgggcaaagctccctgggctggcagcaggcggcggactgttttgatccgcagcgtcagaccagtttttggtggaccaaccgcgccgatggttatccgctctatacccacgtccatagcggtaatttgaccggccagctgttcacgctgctgtttgatcccgccggcggcgcgagaccaggccgtcacggtctgtatccgccgatgtttgaataagcaggtaggccatgaatatagatgaattccttgctccggttagcgcggagcagccctgcggtgaaaacctcgaatatgacgccgatttccaggcaatggaacaagcgatgcagggtaaagccgagcagcagttcggcgacaccattatcccggcggaacccgctgactggacgacggtagaaaagctggcggctgggctacttagccgcaccaaagatttacgcgtcatgctggcgctgactcaggcgtggacaaaacgccgcggcctgagtggttacgcggatggcctgctgctggtgcaacaggcgctgtcgctttactggcagcctatctatccgctgctggaagagtatggcgaaactgatccgttttaccgcatcaatgcgctcgcggggctaagcgataaatcagcgctgaccagcgcgttacgcaatgccgtgttgttacgcagtaatggcgatgaactgctattgcgcgatgcgcaggcgctgctcgatggcagtaaaaccgaatgcgcggattatcccggcggccgttcgcgattgattgatgaactggcccgcggcggacagccggggattgacgccatcctcgacattcaccaacgcttgcagactatccgcgaaatattaagcgattgtctgggtgaaagcggcgtgccggaaatggaacagctgcagaagaccgtcggtatcgtcgccggcgcctgccagataaccgatatttcgtcctttcacgcgtcccgcgaggagagtgccgtgagtgaacatcaagcgattcccgacgcgcttgcgccgtctgccgttgactggcgcagcgcgcaaattagcagccgcgccgaggcgcagcagatgctggaaaaagtaaaacagtactttgcccagcacgaaccgagtcaccccgcgccgctgatgattgaacgggtacagcggctgattgagctggattttatggacatcatccgcgatttagcgccggacggcgttcaccaactggaaaacatttttggacgtcgcgactgacgcgtccggacattatggcgacaggcataaggtctggcgctcaacctttaccgcgcatcttcgatggagaacatcatggcaataagtaaaagtgggcagaaatttatcgcacgcaaccgtgcgccccgcgtacagatcgagtacgacgtagagatttatggtgcggaacgcaaaatccagcttccgtttgtaatgggggtaatggcggatctggtgggtaagccggtcgacaaccaacccgcggttgatgaacgtaagtttctcgacatcgacattgataacttcgacgaacgtatgaaagcgctgaaaccgcgcgtcgctttccaggtcgacaatacgctgaccaacgaaggcaaactgaacgtcgatttaaccttcgacagcatggacgacttcctgccggatgccgtggcccgcaaagttgagccgctgaacaaactgctggaagcccgtacccagctttcaaatctgctcacctatatggacggcaaaaacggcgcggaagaactgattgccaaaattttgcaggatccgacgctgctcaaatcgttgagccagatgccgaaacaagacgacagtgcgaacggtagcgaggagtaatcgatgagcaacccgactcaacaacatgagcagcagtccagccaggcctttagccaggatgaattcagcgcgctgctgaacaaagagtttcgcccgaaaaccgaccaggcgcgttccgccgttgaaaacgcggtaaaaaccctcgcgcagcaggcgctggaaaataccgtcacgttttccaacgacacctatcgcaccatccagaacctgattgccggtatcgatgaacagctgtcgcgccaggtgaatcagatcctgcatcatgacgagttccagaaactggaaagcgcatggcgcggcctgagctacctggtcaacaacagcgaaaccgacgagatgctgaaaatccgctttatgagcatctccaagcaggagctggggcgcactctgaagcgttacaaaggggtgggctgggaccagagcccgatctttaagaaaatttatgaacaggagtacggccagtttggcggcgagccattcggctgcatcgtcggcgattactatttcgaccatagtccgcaggatgtggaattactgggcgaaatggcgcgtatcggatcggctgcgcactgtccgtttattaccggtaccgcaccggaagtgatgcagatggagtcctggcaggagctggcgaacccgcgcgacctcaccaaaatcttccagaataccgaatacgccgcctggcgttcgctgcgcgagtcggaagacgcgcgttatctggggctggtgatgccgcgcttcctgtcgcgcctgccttacgggattcgaaccaacccggtggacagttttgattttgaagagcagaccgacggcgcggatcacaacaattacgcgtgggccaactcggcgtatgcgatggcggcgaacattaaccgctcgttcaaagagtttggctggtgcacctccattcgcggcgtggaatccggcggcgcggtggaaaatctgccttgccacaccttcccgagcgacgatggcggcgtggacatgaagtgcccgaccgagatagccatcagcgatcgccgcgaggcggagctggcgaaaaacggctttatgccgctgatccatcgcaaaaactccgactttgccgcctttatcggcgcgcagtcgttgcagaaaccggcggaatatcatgatgccgacgccacggccaacgcccgtctggctgcgcgtctgccgtacttgttcgcctgctgccgttttgctcactacctgaagtgcattgtgcgcgacaaaatcggctccttccgcgagcgcgatgacatggaacgctggctgaacgactgggtgatgaactatgtcgatggcgatccggctaactcgtcgcaggagaccaaagcgcgcaaaccgctggcggccgctgaagtacaggtagcggagatcgaagacaacccgggttactacaccgcgaagttcttcctgcgtccgcactaccagctggaagggcttaccgtgtcgctgcgtctggtttccaagctgccgtcgttgaaaaccaaggaagcgtaatatgatgccgccgggaggcgactcccggcaggtacaacgccatggaaggaggtaaagaaatgaaattattaccactctgcacgctgggactgctcacggtgctgacgccatttactgtcgtccaggcggctgatgattccgccaatttactgcgcgatcccaatcaactatcacgtaatttcagaagaagtacgcagattagtgaatgtggtgataaaacgttatttatgtggtctttctgaagaacaatcgagagaacttctgataaaagttgggggttcgcaagttggtggcattgctttcaaaatggcatttgtgaacgagttggtttcgttgtttatttctaaaataattcctcgttttttagtgtccgtaggtgtgactggagtattaagtgtgggggcgtctatttcgaggtccatttatacatcatatgagctacgcaatttaaacaaagagatttataatcaattgcgaggaattggtgatttagatttattatattttctggttgagggtaatattaagccatttatcattgcaatcaactgccaacaagctcatggcgctatagataaagaaatattcaaccatttcctatcaggagttggtcgtgttaaataaaatcattaaatacttatgtgtttatattcttttgattttttcattcattctattttttacaactctaggttattatatttttgtgtgtgactggggtggtgatattatagcgctggcgaaaaatgtgtttcttttgatgttgcttattatcgcatctctcgccatatactatttcgcagagagggcaaaatcaaagttgtgatgcgcgatacaatttgattaaaatacgaacccccataaaaacaagggcggtgaagattatttttccgacaagtaacccaatatttattgcattgaatgattcaagcgaaataatataccataatgattgaagaatattgataagagaaaatatgccaatgattgaaagtataattatcaatgctaccgatagcgcttttttcattcattaatccttttttcgctgtagttggttggatttattctagattaaccaggcattagttgtctagcacctgtccgaaatactgagcgacagaagggaacttagagtagttgctgtcataatgcggctattctgaagtggtctgtacggtttaactcgtcaggcttgaggcaatagtaaaatatggatggttttattcagccccatgctttcctgtttgccatataagtgctttttcgaaagcaataattttcattaacgaagagtagatattatggctattgatatgtttctgaaggtcgagggtgtaaccggtgaatcaaaagattctaatcacaccggttggactgatattacctctttttcctggggcgcatcccagccgggtaatatgagcgtgggcggcggtggcggtgcgggtaaagtgaatttcaacgacctgcacgtaaatgcgctgatcgacaaatccaccaccgcgattctgaagcactgttccagcggcaagcatctgaccaaagttgaactttcggtctgcaaagccggtggtcagcaggttgaatatgcgcgaatcaccctcgaagatgtactggtgacttccgtgcagtacaccggcgccgataacggcgacaccgttggcgtaacttatgccttccaggcggcgaaagtgaaacagcagtactgggagcagacttccgccggcggtaaaggggcagaaagcagcgccggctggaatatcaaagaaaataaagaagcataattgcctacgtgccggggattttccccggccattcccaatcaaggaggaaggatacatggcaaatttgcaggaagggggttgtcgtagtcttactatcggcgagatagcattggcacgtttggtttttggcgacgcaataaaatattctgaagttaaagtacataataaaagttacttaccatttaacatgcaatcaaataatgttgcaatgacgcctaatggtgaaatgtatttccgagagccgcattatcgtgatgatttttcaactgagcctcctcgatataagcactggtttatacacgagatggttcatgttttgcagcatcagattggaatgaatgttcgtaccagaggggtattcagttgggcagtgagttataattactctttacctccaaacaagaaattgtcgaactttggtatggaacagcaggcatctataatttcagattattattatctaattaattacggcttgggcgattttgtaaacatcacaggttttgcggggattattggaccagatctaaaagataaatatttacaggcgttatctttgtttattaaaaaccctaaagatcggcatgcatggttatgagtaaattttttattatattggcgttcacaatcatgataaacgcctgtgtacctcacccggcacaatatcagacgttttcagtaacactaaaaaacaatgaaccttgttttgctctccccattaactcagggctggaagcgcctatcactagttcttcgcccactattatgaaaaaaacgggcaatgaatggaaactaatatcaccgccagcgacgttcagccctacggtgatgttaaatagccagcagtgtcaccaatggagtggtattacatggcaagctggagaatatgatgttgcgctaaaggtgtctggtaaaaacgattccgttcgttatggtgctcgattctccttagtagaaagtgcttcagggcaatttaagcttacacaaactgaataaaatgtgtccccgcaaacgccgccgttcttatttcgagagcggcagcgtttgtgcgccaatcatatcagcaggaataggctatgcgattcacgattatttcgaccaaagccggtcatcagcccccgcagggcagctgtgacttttacgcgccgggcggtaccattgggcgcggcacggacaataacctggtgctaccggatgacgaccgcgccatttctcgcctgcaggccatcgttcacgtggcggcagacggcgagtgcaaaattaccaatcgcggcaacgtgacgcgggtggtactcaacgagatcccactggagcgggggcgtcaggttgaactccaggatggcgatatcctcgccattgacgactatcgcatcgaagtcagcgatctgctgcaggatagccaaccgataagccgaatggcggcgagcggtcagccgcctgtcactgcgaaaccgtcgacaccagcgccatccgcagcgcccaccgtggcggaagccgcgccaaccgcggtaccatcagaaatctgggatagcctgatgcaggaattctcgattgccgacagcatctccagcagccgggccaagccgcaggccgataacgcgccgaatcccttcgcagagccgaagcctgccgaacgtaatccggaagatccgctggcgatgttcgctgatagcgaaccgctgtttgagcgcccgccggtggcgacggacgacctgtttgccgatgacaccccatttgatcgcgacagtatttttgccgacgttacgccaacgacgctggtgccaccagttgaaaaaccggctcagcctgtcgccgatgagccgcaggcagaattggatccgctggcgctctttggcggcgacgcgagcgccaaaaccgcgcgtgatgacgatccgctggggctaatgggcggagcgccgctgacatcggtagatgccttcagcaacgaagagcctgctaaaacggttgccgacgagcctgatgccgcttttgattcgccattattgatggcccagccgccgcaggagccgcccgcggcagcgcgtgaagaagcgccggaaataaccttaccgacgccgcaggccgtggcgcggcaagccgcccaaacgccaaaagggcgcttgcgtatcgatcccgtacgtcatgaacatcaggcgaccagcacgccgcagccgggtaacggcgaagtgctgcagggagagctactggaagccttactggaaggcatggggctcggcgatatgcagccggtcccgcagttcgacaaagagaatatgcgacagcttggccaaatgctgagcatgttctcgcagggaaccgtcgcgctgctctcttcgcgttcgatcctcaaacgcggtgtcaaagccgatatgaccatggtactggacgacgccaataacccgttcaagctgttgccttccgggaaaaccgtgctgatgcagatgttcggcgcgcggatgccgggctttatgccgccgaaaaaatcggtacgcgatgcgttgattgacctgcaggcccatcagttagggatgatctcggggatccgcgccattattgccgcgatgctgcagtcctttaatcccgagcagctggaagaagaggctaagcgcgatggccatacttcgcgcctggcgcttccggccagccgcaaagcggcgttatgggactattttgtccgtacctacggcgaaaccgccggggaaattgaagacgatttccacaccctgtttggcgaagcgttcctctatgcctatgacatggaagtgaaccagtacaaagactcacagagcggatcggaagaataatggacattaccacggcttctctttcccgccagggaacgcgcgccagcaatcaggatcagacaggcgaatgcgtcggtgagcgctccgcctgctttgtggtctgcgacggcattgccgggttgcccggcggcgaggtggcggcggaactggcgcgcaacgcgattctggatcggtttgacggcgataatcatctgaacgcccagaccattcgccagtatgtacagcaggccaacggcgccattctccagcaacagcaggcgacgccggattatcggcgaatgggcaccacgctggtgagcctgtttatcgatcgcgattataagctggcctattgggcccacgccggtgatagccggttatacctgtttcgccgcggctggctgtaccacgtcaccactgaccacagtctggtccaacagatgaaagatgccggacatcagaccgacgatattaacagcaacctgctgtaccgggcgttaggcatggccagcgacggtgcggaagccagctatagcgatgtggtgccggtcgaagatggcgatgcctttttgctctgtaccgatggtttctggcacggcgtcggcgaagagcagatgaaatcctccctgcagatggtcaacaccccgcaggagtggttaaccctgatgaatcagtatcttcagagaaacaatgacggcgaccaggcttcgcaagacaactacagcgccgtcgcggtatggatgggcagtccggaagaggcgacgctgctgcactcgctggccgacgccgcgcaatttttccccctgcgggattgagacaggctaagaaggatttttatgaaacattggatattgggtgcggcactatttgccgccaccggcgtcgcgcaggcggaaaactaccgtatcgtgcaatcgccttcgcaaaaactggatgtctggatcgataacattaagggtaataccgcgcagagctggtgcgctaatgaagtggcgctacgcatcgtcgccaatggcaataagaacgtcaagatactggataacttcctgccgcgcgtcggcgcattaatggagcatcagtgttcgcgtttgcagcagctgaactggacgctggttgacgctaacaatggacatatcgcccaggggagcgcggcgaaaaacaaaaaatgggcggtaaaagtcgcgcccgccgagaccgccgcggcggcggaaaaacccgtcgcgccagcctggctgccgccggaagagaaggcggaaaaactgtctcccgccgccgaccgtacgccgtggcaggagttcacattgcagggcggctgtcgactgcgcaccttctggcaggaaaacgccgccgccttattcatccccgccgttgaatccggtagttgcgaaaagggcggctggctgagcggtcgcaccgtcatcactcaatccgttaacggtaaagaaaagcagagcaccgtgaccttcgtacatggtttcccggtcctgggtctcaatgccgccgctgaccccaataaacttctgatcaccgcggtcaataatcaacgcatggtagtcagcaatgaaaacgctcaacaaagctggatgatcctgccctatgtcgccgggcaaaacggttggcagatgaccggcacgctggctatcgaaatgtcccaggaactggccaacgatccgtcgcgtctacaggcgcggatagaggcggcgcgtagcgtctggacgccgtggctggcgccggatattaaactcaacgttgtgcttatcgacggcctgcacccgctgctgcgtaacccggcggccggcgcatggcgcgcggcaaactaaggagcgacgatgaacacgctatatcaacagctggctggcgaaagcgtcggcgcggcgctgcaacgcctggaaagcgagatcaaaagccgtcccgccgatgccgatttacgtgcggcgttcgttcagtttctatgcctgagcggtaactggacgcgcgcgttggcgcagctaaaaagctggctggcgctgaagccgcaggcccagccaacggtcaccctgctggaacagagcattcagggcgagcagcagcgcgatgcggtatttgccggcagcgcccgcccgcagatgccggacagccagtggccgtggctgtctgcgctggcctccgcgctttgttccgattcagaaaccgcccagcgacagcggctggccgcctttgaacaggcgccccttaatcctggtaatctcaatcagacggatacccccgcggtcgcttttcactggttgatggacggcgacgcgcgtctgggcccggtttgcgaacttatcgtcaatggccggtattgctggctgccgttcgccgctatcgccgaaattcgttttcaggccccggcgagcgtcaccgatctggtgtggcgccacgctctggtgcgcctgaccgatggaagcgagcaggtgtgtcagatccctgcgcgttaccctgtcacgccgcaggcggaagcccgcttccagttgggccgcgccaccgagtggcagccgctggacgacgaaggatcgctctatcagggccacggacagaaagtgtggcttaacgatagcgatgaattcccgattctctctctcgacgtggtgagttttgcatgaacaaaccggtacgcgacggtgacgcgctgcgcagcggctggcaggcgcgtagcaaacaagagaccattggcgcccgcgataagatgcagccgtcgctgctcgaccgcctgaccgataatcagccgcagaaaaaatcagagccgcttaacagcaacctgatcacccacagtacgctgcgccgtcacgtgctgcgcgatctgcagtggctgtttaataccatcaatcatgacgatccgcaggcgttggccgcgctggcgcacgtgcgccgttcggtggttaatttcggcgtcgcgccgctggccgggaaacggatgtcggatattgagtggcaggatattcagcgcaaacttaccgaggcgattatcagcttcgagccgcgcattctgccgcaggggctgcaggtccgctgtatttctgatacccagtcactggatttacataatgtcctgtcgattgaaattaaagggcggctgtggtgcgtaccgtatccattagagtttctgttccgtaccgatgtggatctcgaaaatggccactttgaattgaaagacgcggggtaacgatggaaggcaaactgcttgaatattacaaccgcgagctggcctatctgcgtgagatgggcgctgaattcgccgaacgctatccgaaggttgccggcaggttgggcatgcgcggtattgaggtcgccgatccttacgttgagcggatgatggaggggttcgcctttctgacttcccgcgtgcagctaaaaatggacgccgaattcccgcgtttttcacagcgcctgctggagatgatcgcgcccaattatctggcgcctacgccgtcgatggcgatagccgaactgcagccggacatcaataaaggcgatctgagtaaaggtttcgtggtgccgcgcggtacgatgatggacagccaggtactgaagaaaaacggcgtcacctgtagctataccaccgcgcacgatgtcacgctgttgccgctgcgtattgagaaagccgaacttggcggcatccccgccgatgtgccgctggccgcgcttgggctcagccagcgcggcgccgtcagcgctttgcgcctgcgtataagctgtgaaggggctcaacatcttggccatctgacctttgaccggctggcgtttttcttaagcggcccggatattgaggccctgcgcctgctggagctgattcttgcccaccaggtcggggtggtgtgccagaccaccgggcgcgatccgctgcgtttttcgctgagcgaagaggctatccaacaagagggtttcgccgccaatcaggcgctgctaccggaagatcttcgcaattttgacggctaccggttgctgcacgaatactttgccttcccggcgcgcttccgctttatcagtattaacggcctcagcaagttaatcggccagtgcaaggaagaaaaatccttcgatatcattattctgctggataaaaccgacgaccggctggaacaagtggtggaagctaaccacttcgcgttgcactgcacgccggtgattaacctgtttccgaaaatcgccgcccgccagtcgttgagcgacagccaacatgaataccatctggtggtcgataacatccgcccgctggactacgaaatctattcggtgagtaaaattcacggcagcgctgatggccaccgcgacgatcgcgagttccgtccattctggagttcatggagcaaggatgccggagattacggcgcttatttttcactgcgccgcgaacagcgggtgctttccgaacacgcgctacgctatggcacgcgtaccggctataccggctctgagacctttgtctcactggtcgatgagcagcatgcgccgtggcaggaagatctgcgttacatcaccgccgaggtgctgtgcaccagccgcgacctaccgttgatgctacaacaggagctggggcaattcgtgctggcggattcgctaccggtaaaaacattgaaaatgcgtagcggcccgacgccgccgcgaccggcgctggcggaagggctcagcacctggcggctgataagccagctgcagatgaactatctcagcctgatggacggtgaaaatggcgaaggcgcagcagcgctgcgccagttgcttgggctgtatgccgggctggcggagaccgccgtggcccgccaaatcgaaggggtacgccactgcgtgctggagccggttcatcgccgggtgccggagccggggccgatcgtcttcgcccgcggtatcggcattaccttgaccgttgacgagcgcgctttttccggcgccagcccgtggctgtttggcagcgtactggaacgggtctttgcccggctggtgtcgctcaacagctttaccgaattcaccttatgtagccagcagcgcggcgaaatcggttactgggcgccgcgaatggggaaaagggcgctgatatgagtgacacgttggctaccattcatcgcctgacgccgctggcggacgttttctggcgcgaggttaccgccgcgccctggcgctacgatctttttcatctgctgcgccgcattgacgcgcaaggggcgaacgttatccgcttgggcgcgcgccgctgccgaaatttgaatcgctgcgcatcgggcagacgccatccatggggtttgcgcccgcgacgctggccagcgcgcagaaacgggaaaatagcgcggtgcatgagatatcgattctcagcttcggtctgttcggccccaatggcccgctgccggttcatatgaccgaatacgcccgcgagcgtattcatcatcatcaggacgacagcctgagcgcttttgccgatctctttcaccaccgcctgacgctactgttctaccgcgcctgggccgacgcgcagccaacggtatcgttagaccgtgcggacaaccgccgctttgagcgctatctcgcctcactcatcggcatgggtcagccggggcaactggagaagggcgacctgagcccgcatgcgcgtttcacccacgcaggccatctcagccgccatggtcgggatccggaagggctggagaagatcctgcgaaattacttcaaagtcccggtcaacattatcagcaacgtgccgcaatggatgccgctgacttcgcgagaacaagcgcaactgggggcgggaaggcgtttacctcgcctgggcgtctcggcgtttctcggcgtcgcggtacgcgatgttcagcataaattccgccttgaaatcggcccgcttagcgccgccgaatacgcccgttttctgccgggcgaaaacgcggtaaacgaattacgcgactggatccgccagtatcttgggatcgaatatgcatgggatgtcagggtacttatccgcggcgatgaaatacccggtacggtcctcagcggcgatggcaaactgggatacagcacctggcttggccaccagccagcccccgcgccgcgtggcgatttagtgtttagcgtggagcagagcgacgcctgatgttgtctgctctctgacacctttattaatgttatcaatggaaccgaacatgtcagaaatcagccgtgccgtactcttcggcaaactggatacgctgttgtttacctcgctggaaagcgcaaccgccttttgtaaactgcgcggcaacccttatgttgagctggtgcactggctgcaccaactgatgcagcagcaggacggcgatctgcaacacattatccgccatttcgcccttgatgagcaggcgctgacccgcgatatcatcgcggccctggatgcgctgccgcgcggcgccagctcggtctccgacctttctgagcatatcgatagcgccgtcgaacgcgcgtgggtttatggctcgctgaaatatggcgtcaaccgcatccgcggcggccatttgttaatagggctgctgaaaacctggaatctggctaacgttctgaaaggcatttcgccgcagtttagcaaaatcaatgtcgatgccttgaacgagagctttgagacgttgctggccgccagtaaagagagccagcaggcggcggtggaggcggccaacacgagcgcgacgccgacggcgcagggtacactggctcagtacggacagaacctgacgctgcgggcgcaggagggcaaaatcgatccggtggttggccgcgatgaagagatccgccagatgttggatatcctgatgcggcgcaggcagaacaacccgctgctgaccggggaagccggcgtcggcaaaaccgcggtggtggaagggctggcgcggcggatcgccgcaggcgatgttccgcagccgttgcgtaatattgagctgtggctgctggacatcggtatgctgcaggccggtgcgggcatgaaaggcgaatttgaagcccgtcttcaggcgttaattaacgaagtgcaatccagcccgacgccgatcgtgctgtttatcgacgagatccacaccctgattggcgctggcggccagcagggcaccggcgatgcggcgaacctgctgaaaccggcgctggcgcgcggacagttacgcaccatcggcgcgaccacctgggcggagtacaaaaatatattgaaaaagatccggcgctgacccgccgtttccagacggtgcaaatccacgagccggatgaagagaaagcgttgctgatgctgcgcagtaccgtatctccgctggagaaacaccatcgggtgctgctgcttgatgaagctgtcaacgcggcggtgaagctgtcgcatcgttatattcccgcgcggcagttgccggataaagcggtcgcgttgctggataccgcctgcgcccgcgtcgccgtcagccaaagcgcgccgccgccgcagttggaagattgcctgcagcgcattgccgccctggatgtggaattggagattgcccaacgcgagaaccgggtggcgattggcgatgctcagcgcattgagcaactcaagcaggcgcgtcagcagcaggaaactgaacgcgataccttgagtcgtcgctgggagcaagaacgagcgttggttgatgaagtcatcgcgttgcgcgcgcaattgcaggaggctgatgacgacgcccagccggcgctgcgccagacgcttaatgaaaaacagctggcgctaaaaaccctgcagggtgagatgccgctgctgttcgcggcggtagatgagaacgtggtggcggcggtggtcgctgactggaccggcattccgctggggcggatggtcaaaaatgaaattgacgccgtactgagcctggccgacacgctcaaccagcgagtgattggccaacgccacgggttggatctgatcgccaaacgtgtgcgcacttcacgcgcgcggctcgacgatcccaataagccggtcggggtctttatgctttgcgggccatccggcgtaggtaagaccgaaaccgcgctggcgctggcggaatcgctgtacggcggcgaacagaacgttatcaccatcaacatgagtgagttccaggaggcgcataccgtctcgaccctgaagggcgcgccgccgggttacgtgggttacggcgaaggcggggtgctgactgaagcggtacgccgccgcccgtatagcgtggtgctgctggatgaaatcgagaaggcgcatccggacgtgcacgaaatcttcttccaggtgtttgataaaggctggatggaagacggtgaaggccgccatatcgatttccgcaacacaatcattatcttaacgtctaacgtcggtaccgagctgattagcgcaatgtgcgccgatccggatctgatgcccgagccggaagcgctgagcggcgcgctgcgtcagccgctgttacaggtcttcccgccagcgctgcttggccgcctgttggtggtgccgtactacccgctgagcgatgcgatgctggggcaaatcgtgcgtctgcagctggcgcgtattcagcgccgtctgcaggacaatcacaacattgtctgtgagattgacgacagcgtcgtcgagcaggtggttcagcgttgtaccgaagtggaatccggcgggcgtatggtcgatgcgattctgaccaacacgctgctgccgcagatgagccaaattctgttaaccgccaaccgtaacgatgagcagtttacgcaactgcgcatcagctatgcgcaaggcgagtttcattgtcagtttgccgcgtaacaccatcagaaagtgagtcttaagatgacggatcacgaaaacaatcggactgtcctgaacgcgctgccggtcgggtatcgttttaacgaatttgaaataaaggaagtgattggcggcggcggtttcggcattgtgtatcgcgcctgggaccatcagctggaacgtaccatcgcgataaaagagtttatgccttcgtccctggcggtacgtaacgaagatatgaccctggtactgcgtagcgaacgcttcagcaaagcgttctccgccggattaaacagctttatccaggaggcgaggctgctggcgcgctttaatcatcccaacttgctgcacgtgctgcgcttttgggttcagaacgacaccgcctatatgggcacgctgttttatagcggcaccaccttgagccgcctgcgcgagcagcagccaaacctcatcgatgaggcatggatccgtcggatgctgccgatgctattcggcgccattaaaaccattcacgacgccggctatttgcaccgtgatatctcaccggaaaatatccagatccaggataacggcctgccggtgctactcgatttcggttcggcgcgccgcaccatcggtaatctctccgacgaaaccgaaactatgctgcgcccgggttatgcgcctatcgagcagtataccgacgataatgacagcgaacagggcgcctggaccgatatttatgccgtcggcgcggtgctgcatacgctgatcgtgggttcaccgccgccggtgagcgtggtgcggagtattcaggacaactatcagccgctggcggaactgaagccggcgggttactcgctgccgctgctacaggcggtggataaagctctggcgctgcgggtggaagatcgtccccagtcaatcgacgcgtttgccgagctgattgaaatgccggtgtccagtatcgatgacgtcttgtcggtcaaaaaaaccggcaccatgctggcgctggtcgaagaggaagaacaggcgccggccgcgacagactggcggcgctataaggttccggggatggtcgccgcaggcgtactggtcggtattattgccggcggtatgctgttcagcggcggcggcagcgaggcgcaacctgcacagagcgccagcacccagccgccagcggcggttacgccgccggtaccaacgcagaccgctaacgcgcagcccgctccgcccgttgccgttaaagagagcaaacctgcagcggcggcggcgcctgttgctcaggtttacgtgcgcatgcgggaaggggaaaagctcaaactcaatggcgaaccacataatacgcaaccggccacaaacggcttcgcctcgctgaaactggcgccgggacattatgaaattaccctgcagggtaatggacaaacccgcgagcagacgctggagatcgccaaaccgggaacctggcttattaatccatcgagttgataagccaaaactgacgagtgaaagatgagtatttttactaacgtaatcgttctggccgtggccctactgtttatttatatttttgcgtcattactgattcgcgatgcgaaaaataaaaaactcaaagcggctatccacaatgatggcgttgcggtgtctggcaccatcacaaatgtgagaagccgctcgggcggtaattccgggtttattaatattagcgtcgattttaattacgttaacgaaaaaggtgaattgctgaccggtcagcgggatatcgttattgatattacgcgtatccaaaactttcaaccgggaaagccgattccgttacgctacttgcgccttgacccgcaacaggtgctggtcgatctgccgaacccactgttaacgcgcagctagcgctgcacaaactgtatccccctgaatggaataatattatgtctaacaggatcaccgttcagctacccgttgaggggctgcttttctggaaactcagcggacatgaagccatgtcggaaatgttcgagctcagcttaacgctgcttggcagcgatgcgcgtctggatcgcagcaagctgcttggccagccggtcaccgtgaccattccgacgcaaaacgcgctgagttcgcgttatttcaacggtaaaattacccgcgtggcggtgagcgccgttgaactgagcggtatccgctacgccgcttaccaactgaccgttgaacccgacttatggccgatgaaactcgaccgcaacctgcgtatattccaggggcagacggtaccgcagatcatcaatacgttgctgagtgaataccaggtcaacgttgaggataagctgaacggcagttaccgcgtctgggattactgcgtccagtatcaggaaagtagtttcgcctttatcagccgcctgatggagctggaggggattgcctaccatttccgtcacgaggcgggtaaacatacgatggttctgaccgattcagccacccagcatcaaccggtaagcggctatgaaaccattccctaccaccagacggcatcgggcggtattaccactgaagaggggatcggtcagtgggcgctggaagatagcgtgacgccggggatttacagcctcgatgactatgatttccgtaaacctaacgcctggctgtttcaggcgcggcagaacccggcatcgccctctccgggcagtatcgacgtgtacgactggccggggcggtttgtcgatcacggacacggtgaattctacgcccgtatccgccaggagcgctggcaggtagaacatcagcaaattcaggcgtccgccaccgcggtgggcatcgctcccggcgcaacgtttaccctaaccaatgcgccattctttagcgataacggcgaatatttgacgacctccgcagattacttatttgaagagaacagctacgccagcggcggtaatagcgatatctcgcaccaaatccattttagagtgatcccctcttcggtagtctatcgcccggcgcaggtaaccgactggccgcgcacctatggcccgcagacggcgaaagttgtcgggcctgaaggggaaagcatctggaccgacaggtatggacgcatcaaagtgaagtttcactgggaccgccacgccaaaggcgatgacaccagctcatgctgggttcgcgtgtcgagcgcctgggcaggccagggctttggcggagtgcaaattccccgcgtcggcgatgaagtggtcattgattttatcaacggcgatcctgaccgcccgatcgtcaccggacgtgtgtataatgaagccagcatgccgccatgggatctccccggcgacgccacccggatgggctttatgacgcggagtaaggatgggaatattgataacagcagtttcttgttcttcgaagataatccgggcaatgaatccgtcgagatgcattcagagaaagatatgaagatctcggtagagaatgataaacatgtaactattgatggttgccgtactaccacaataggaaaagagcaaagtgatactgtcgttggtgattcatcctttcattatcagaagaaaagaacaactaaggtagaagatctagagctgcaagaatataataatggtgaagaaactataattaaaaacggtcgaaaaacagatatacaaaatggaggtgacatccgaaaaattaaaggtgatcgcgagctaactctggatgggaataacaatgaggaagttctcgccaacgaaaccattcatatcaatgggaaaaaagaaacgacaattggtaacggagatgtattcactataaaatctggagggcaaaaacaaaatattcaggggaaagttaatgtagatatagatggcgcctggatgcaaaccgttacaggaaaagtgaagattgaatcaccagaagaaatagtaataaaaagcaaaacaaaagtttttattgactctcccgtttttgaacataacgatgtagaaaagaaaagctttgcccaaaatgcaatggatttcatcggccaatatgttacaatttcaacaggaagtgtcgcctttaagggtgttagctatgcagcaacaggaataaatatttcacatcaaggaatgacatttggtcgtaccgttatcaatgctcaacgagtcgaaggggctcgggttgacagcggcagtctaagaaccgcattatttgcacttcatatgttaatgtagtcagaggattatatgtctatctcttgggttataaatgcagtattgacgtttttaattatttttgtgtgtttttatttcgcaaatagaatagtgaaaaattcacaacagagagagcacagtataatggaacagggagatgatgtttatgttacaattttatcaatgaagcaaagcggagttttcataaacaacaatcctgtagtaacaatggacttgagggtggcaaatgctgctgataacaaaacatggctactcgaaaaacatgatgaaaccatacaattaatagctcttgatgcttaccaggttggttctatttatagagctaaactagatagtaaaactaaatccattgtttttgttacagacccttccaatgggaaacctttggcaatttctaatgtgcctcgttagaaacgacgcgttttaacatgccaggtgcaggtatgaattttctttctgaacactcaggccctattgcgttaggtgtaatgttgatattcatcttcatctgtctcagaggattaaagggacagaaggaagattttagtgaaataagaaattgggttgcaagagacaactggaacggcgaattagcaacagggaaattaaaagaatggaaacaaacatcaactaccaataattttgaccatttctatatttttactatcgagtctaatttgagtggtgaagctcaaacatataaagcagcaactgtgttaaagacctctgaagtcattaaattaaaaaaggatatgcctgtaatgttcaaataccagggagtaccccaaaaaaaacagcagtcatgagcgtaggctaatactagtcgatgcacgacatataattgctgctttaccctttgatagggaacatggcatagaaacggcctccaaatgctgcgtttcctttccattggttttagctggtaataaataatcaatccagaacctaacgatttctcaattttttgcatttaaaataagacagccatcaatggttcacttaatgtaagattttacgatgtcaaattcaacaatgtggtctatctttataaccattttagttttggggtggttcttatacagtataatgaagtcaggaaataatgatgagaagtttcgtaaggaaggcattaaagttgaagctaaaatcattagtaaacaacatataagtacctctggcaccggaaatatgaaatttaagtttgaattggaatttatgactcccgatggagttgtcgtcacatatgctcgtcgctttataactccggaagaaatggttaaaattggtaggaaaaatacagtttttttatattacctcccaggtgcccctgaaaaagtctaccttgttcctggagatatggagtaaactattgatgatagtttttgttaacagcacggatgcaaccctatgaatgtcatcacggaaccatcttttatctttggcattgtggtgacaatcatagcattaggtatatcatttgctgccttcaaaccgaataaaactgaagtttcagcaattaaaaactggttgtcgagagataagtggtccggtcaaacaatccaggttccgctagaatcatggcgtcagacagaaacaaagtacggcaatgattatatttatgatttctattttaatgcaaatataaacggttctgtaaaaaaatacattgcgaaaggcattgtaagacccgatgatattcataaattaaagaaaggaatgttattatcagtaaagtacagtaataacacgcctctaaagatagcggttgcttccgttaattattaaatgtgtaatggtgcagtaatatttgatatttcattctacctataaaatcacgacctgaaattgattaaatggattttctaaatacaaaatggttttatattctgcttgtggtatgccttatagcactctatattattgggcggaattttcgtagctccgttatccctatgatcaaggctgggtttattgaaagcgctgttcttaaaacaggaatcgcagtaaatgccgatattattgcatctcatcaaactagtatgtggggtggaaataagccaatataccatttgaccttaaaatttaaaactcttgaaggtgttgaaaccgaagcgagtgttgatatggggctaagctttgaagaaattgagagatttaaacccggcaatgggacaacaataaaatacgacgctaaaaatcctaaacgaatcgcaatttatgacagaccattatttttataatgtgacaattatttatatttaaaacctaaaagagctaacaatgaactttatttatcaacactctttgttaattgttattgcatcgattgcatttagcttttttctattgttcggttcgctgcgaagtctcaaaggacagggcgggaccttactgaaataaaaaactggctaagccgtgagcgctggcccggtgagataaaaaacgcatctctggtaagttggcgtcaaactaacgcgaccaataatttcgattattattttgtatttacctttgaggcgaacattgagggtacgacaaaacagtataatgctgccgccgtggtacgtgcttcagaaatcccaaaattaaaaccggggcttcaattaactataaagcatgagggcgttccgccaaaacgaatggctgttatggatgtggattatgaataaacagggtatccactagacttctatgctcgtggccatttaggtggccacttaaaaacactcgcagaatttctaatatgtggtgaacttcatcattaatggatcgttatgtttgactctatgtggggaacattaatattagccgttttaattttgtttggtttgttcttatattgctatcgttcaggatccaattatgataagtttaaggcaaatggcattcgtaccgaggctaaaatattaagcatggaaaaaattggcgcgagtggcggagggagcactaaacttaaaatggaattgtctttcaatactgactcagggccggtcacggcaacggctaaacagtatatttccccgcaaaatgtggtaaaaatcatgagaaacaatactatttacatctactacatacctgataatcccaaagagttattaccaacaccctgggagatggagtgatggagtctctctatattgtgagaaaaccaagatgtttttttacctaaaatcatgagttgcgaagccttaactgaaacccaccagggataattatgtcatttgaaaaatggatcaccaatatgtctccaggggaaatgatacccttgattattggtttatcagtaagtatattattcatgatggccacctatttcacattcagaaagtcatcgttacaactaaagtcagtgaaaatctatttaaaacgcgagcgctggcgaggagacttactgagttcgcggattgaattctggcaacaaactaatgtaatgctcggtaataatctatttttcgatatatattttcgcatcgatgaaatgcctcaattattttgcgccaaggcgctgattgcaccagcacaaatacatctattacgtaaagggctgtccattgtcgttaagaaaggacgcggcaataagattgctattatgcaaatcggtgatgtgggttaattcactatggatatactcttttttgtcgccatggggctgattgtcctggtgtttggtatctatcccatggcccgttttctttatcaggatgtttacccgtatttaaaggatagtttcacccacagtgaggtcctgcaatccgggattgcggtcaacgcggatatcattgccgcacaccagaccagcgcctggagcggaagtaaaccgatctatcgtatcacctttaaatttaagacccgcgagcaggtggaagttcaagctagcctgaatcacaccctgaatttcagcgacattgaacgttttaagccgggtaatggcacaacgattaaatacgatccggcgaacccgcagagaattgcgctatacgacaggccgctttttttgtaagaactaatcaggagataacatggaaatcgtctctaccatagtgctaaccatggcatgggccattccgctggtagtattgctctttgtggcctgggttgcgatgcagaatatacgctctgcgcgacaagataaaaaacgaaaatgaatggtgtcaatgttaaggccaccatcctgcagatcaaatacgatcgcgaccagcgaattaataatcactactcagccattttgacccttcgttatcattggcatgagcaagaactgcagggcatccgcggcgttatattccccgcgcaagaccaatctgaggttcaggtgaatcaattaatcaatattcgcgttgaccaggacgacccacaacatttctactgcctcgattatcgtaatgtctgatgctaagcatcagttccccttaagaacctatcgcattagggctatatgaaaatcattaaacccttacgcctgagcgtactgaaccggccattccgctggcagggcaaaaattatcttggcgtttcggtgctggcgttggcggatatggggccaaacccgcaactgcgccctgaaatggaactgtggcagcttgccgccgacgaactgcaaaccagcggcggcgtggtggatatggccatccctaaagtccgcgccgaatttcttgccaccggttatgcctatacccatcatcagcaggaaaaaagcgcctgcgtggcgcgcatcgatatcgacaaactgagtaagtcgttggtggtgttcggcgatcgccagtggacggggcaacgtatgacccgaccgcagccgtttagcgaaatgcgcctcgactggagccgcgcctttggcggcggtgattatgccgacaacccgcacgggcttggtgtcgcgccggtaaaacagcaggggcgcgaacatcatcctctgccgaatattgaaccgctggagggaagagtaagctcgccgcagcagaaaccgcagccggcaagttttggcccgttggatatccagtggccgcggcgctttagccgaatgggcaaaaaatatgatgctagttggctacaacaggagtttcccggttttgcccgcgatattgactggaaagtctttaacgccgccagtccggaccaatggtgggaggatcgggataccttgccgccaggggcgaaatggcggatctggaatatgcatcctgagaaaccaatgcaggagggccagttgccgccgtggcaggctcgctgttttattcatcgccagcgcgcggatgaaacgctatttgaagaaattgccttacgcgccaccacggtatggttctttccccatcgggaacagatgatgcttatctggcaggggcacattcgtatcaatgaagacgatgccgccgacgtcctgcagctgatcccggcgctggaaaaagagggcgccgcccgttcgcttaatcactatcgcaaggtactggcccagcgaatggataaagagaagggcgcgctcttctcctttcgtgaaaaagatctcataccggaagagaccatcggcccgtggatcgacaatgaaattgaacagtcgccgagtccgcagcaggagaatatgaaaaaccgcgcccgtctgctgcgtgaacagcaccgcgccgccattgaagccagcggcggtgatatcgatagcctgttggcggatatcgacgaacccacgttgcctaagcttgaagacctgccggagtttatcgccgacatggagcgtcaggcgcaggaaatggagaatgatgcacaacagcgcaagcgtgagatggaggcgcactatccgcagttgaataacgatgaaaaccaaccgcgcggccccgaatccatgcaccgaatgcaggagatgctgcatcagcaccaggacgaactgagcgagaaaaagcgcgcgcaaacgcgcgaggcgctacatcagatgtacctggccgcggtgcagcatcagccgccggcggtccggctgaagggcgatctggcgatgatcctgcgccaacgcgccgagcgtaccatggcgcagggcggcaattttagcgggatggatctgaccggcgttgatttttccggcatggattttcgcggcgccaattttgaaaaggcgttactggaatgcgcggacctcagccactgtcagctggataacgcctcttttcaggggccgtgctggccagaacggagctacagcattcgtcgctgcgtaactgtgattttagcggcgccagcctggtactggcggagtgccatcaaagcgacttcaccggcgctcgctttgaagatagtcagctacagaacgcgctgtttgcgcaatgcattttcgatcacgcgacgctaaaaacgctgatccttcgggaaatcagcctgattgactgccgttttcagcgcgccgagctggatggctgtgtctttatggaactgacgctggcacaacctgatttcagccacgcgcggctgcacaaatgctcgtttttacaatctgaactggagcatgccattttccatcaggcgacgctggaaagctgttcgctggtgcagaccatagcggagcgcgctgattttagagctgcaacatggctagccagcgctgcggtgtcggaaagttcacttatcggcgccgacttcagccacgcgacgctgcagcagagcaatttgcgccagacgccattacagggcgcgcgctttgtgctggcaaaaatcgaaaacagcgatctgagtgaggccgattgtcgcgatgccagctttatacgcgcgaatctggtcggcagtctgtttgttcgcaccgattttcgcgaagccgattttaccgacgccaacctgatgggcgcgctgctgcaaaaaagccagctggccggggccaatttcgaaggcgccaatctgttccgcgccgatctttcacaatcctttaccagtaaaaccacgcggctggatggcgcatggaccaaacgcattaaaaccctgccgaagcgcgatggagaagtgatatgacgatactgagcccggaggagatcgttcagcgtatcaaaaacggcgagccactcaatgaaatatcgctggatggtatcaacctgcagggctgcgatctctccggcggtctgtttcaggaggtgtcgctacgcggcgctaatctgcaaaatgccaatctgcatgaagccctgtttaccgagtgccagctgcagaacctgcagttgcaaggcgcccaacttaagcagacgaccttcaatcagtgtgaaatggcccatcttcaggccgccgaaaccgcgcttgatagttgcgtgtttaatcagtgcgacctgcaagagagcgatttctcggcgacgacgctgcaaagcagccagtttatgcgttgccagatgagcaggagccgtttttgcggttcaacgctggaacgcagcgtgttttatgaggctgagctgactcacgccagctttgcgcaaagccgcggtctgttgaccaccttttaccatatcgatttgcgggacaccgcgcttgacggaatgcagtgcgaccggctggtgtttttccagtgcgatcagcgcggcaaagactattcaaggcaggggtttaccggttgccagttcaccgattgtccgctggacggcgcgaagtttaacggcgcccagctaacccagtgcaatttcaaaggcgcgtcattgcgtgaagcagaactcaatcaggtgaacgccagccaggcgctgtttatggaggccgatctgcgcggcgcccagtgtcgcggcagcctgttcgaccaggcgatatttgtcggcgcgatactggagcaggccgactttagccagagcaggttgttccagagcgttttacagcgggttcaggccgccggggcgcgattcgcgctctgcgatctgacgtggagcgatttttccgccgccgacctgcgccaggcggatctgcgcggtgcgaccttttcccgcacccgactgcatcgcgcccgccaggacgaagcgctgtttactggccgccaggggatcctggaatacgatgaagagttattagccgctgaggcgtggagcgcccagcgccacagccgttgttaaggagacaacagatgacaaccattaatcacaaactggcccaggcggtgatgccgccggcgcaggcttccggcacggtgacccattgctttgccgacggtagcgtgaccgtcgagagcgaagggcgcggctggcactgtcggcgagcggtcagttgtctgatcgcgccgcaggctggggatcgcgtactcatcagcagcgtggacaaccagatctggctgttagcggtgctggagcgtgatgaaagccgccaggcggagctcagcgtaccgggtgacctgcatattcaaagtcagggagaactcagcctcagcggtcagcgcctgtgcgtcaatgccgcgcagggggactgccatatcagcgagatgaactacagcggcgataagctctcggcatgggtgacactgtcacgtattgttggcaaacgcgccgaatcggtctggcaaacggtgacgcaaattagccacaatctgctgcgcactacccggcagaccgagcaggtgcgcgccgggcagttggatatgaaagcggaagattacgcccgcctgcatgcgcacaatacggttatcacctcaaaagcgatcaccaaagttgattcagaacagatccacatgggctaaggagctaattatgtttgctaactgccagctattcggtgtcgatttagccttccccgacgtctgtctgaccccgatgccagcgccgacaccgattccctatccggacatcgcgctggggccgacggcgatccctaacgcgctcaatattctgtttatgggcatgcccgcgcacaatatggcgacggtgacgccgctcaccaacggcgataaccccggcgtggcgaccggggtggcgtcaggtacggtgatggggccgtcgcgtcatctgactggtgcatttaccgtgttgttaaaaggcacgccggcgacgcgtctaaccagcgttagcctgcaaaattcgacaaatgcggtcggtatgcgcatcgtccccagccagttcaaggtattgatgctggcgccgtaggaaacacgttccagatgccatacctgaacatcattctcgggaagcctttttacgatctcctgcagcatggccgggagatcgaccgcgctattgcacgccgggacgccagcttgctgaatcactctacgccagaacttgaacgctacttttcgcgaccacctggcgaacgtccccggcaaaacccatctccggtcgccgcgctattcccactgttcttagtggcttttgcattcaatctgctaccatttttgcagacgcgcccgccatcctctgcgccgatacgggtagcaagtttctttataccagcgctagtggtggttattgttctgttgaccagcggcgtgttgctggctcgcggttataccctcgggctgaagggatttctggcgctatttcttctcctctcagcgtcaacggcggtgcaagcattgcgagcgatggtcagcgcaggtgaaagcctctggccgctggcattcgccgcgctggcattactgtgttgccggctaatatttaaccgccagggattcgtgctgttcacgatttattgtcgtagccatcggttggctcttctcgcgggcaaactacgccggcagcgcaaatagggagtggtaaaggcggtgagcaacccctgactatcaacggatagccagggattttgtttattgcgggtaattaaacgcgtcaggatggttttcaaggctgccgctcagcgcggcaaacaacacggttttaccatcaatcgacagcgcatcgctgacgttaagccaggtcagtttttcttgcgatgttttctcatcaaccactgagaagacgcccgccatctgtttggatttttcagaccagatcacggcgatacgttcgcttccacaatcgtgtggtttacaggcgcttaatacctgccaggattcagatcccagtttcacggtttgtgccggggatccggtaccaccgctgttaacccaagccgggagcttatggtcttttaccatctggctgaacgacgctttggtcgcattatctttggcaagtgaagtcagcgtaacatcgctttgcgccataacgctggcggatgcggtgagtgcgacgatggcggcaagtgctttgaacatgtttcctcctggagttgatatgtcctcatttcgggccccttaatagtgggcgcagagcatcattaatgcaaatgaacatatttatacaatgaatgtgatcacccgcgcaaagcgtggacttatccggctttgacatgtcatgatgcacattggttaaatttttgtattaatagccgagagtgaagggctaatacaaaagggcatatttattcaggcgataacgcatggcgtatttgaatcatctgttgacgtttattgaaagtaatccggcattagcgatcggctttaaccttattctgttggtcgtctccggcatctttgcccatcttttgtgcaagtttttgctgattaaagtgatacgcaaggtgttcttcgccagccataaacaggacgtaccgctggaaaaagaccgccgtatcgccgagaaactgtcaaacttcattccggttattatcgtctactatgttctgcagtttatgcccaatatgccggcatcgctggtaacggcgattaataccatctgcggaattttgttttttatttttctgtcgatcttcttcaacgaaatgctggatatcgtcaatagctcttatctgcgtaagaccaagcgcaaaaaccactccatcaaaggctatatccagataggcaaaatcttagttcacattctggccgcgattatgatcctcgccgtgatgtcgaataagtcaccggtgattatcatttccagcctcggcgccgtcgcggcggtgctgatgttagtgtttcaacataccttgctgtcgctggtggccaacgtccagctatcgtccaacgatgtcctgcaactgggcgactggatcgaaatgccagacaagaacctgagcggggaagtgacggatatcgcgctgcataccattactatccgtaactgggacaacaccatttcgcgtattccgaccaagaatttccttacagaaacgtataccaactggcaggcgatgttctcgtccggcgcacgaaggatcatgcgcagtattaatatcgatcagcactcggtaaccttcctgaatcaggagatgttaaccccgatgctggcaatccgcggggtgagtgagccgctcagtaaattactggatggccgggatccgggcggcgtcgcggatcgctggtttattgataacgggttgactaacctgacgctgtttcgccattacctgatgagctatctcgccgaacggccagatatcattaaagatatgtacatcgtggcgcggacgttaaaaccgtcgccgtccgggctgccgctggaaatctactgctttacctcctcgacgctatggatggattacgagaacacgcaatccgctatttttgaatacattaccgccgtggccgggcagttttcactgcgtctttaccagtatcccgcggggcatgatttctggcgcttatcgcaggaaaacaggttacggacgacgacaccgccgtcgacggaagggccataattggcgcgtatatccatctcgacaacaggatgttcagaggatgctgaagttcatgaaagacagtttgctgctcagtgcggtcgtcagggacagaataaaaaccaacgatccgcagcagcttgaaaagcttaaagacagattaaaagaccggatgggtattccggtcggctggcatatgtcaggaataccgctggtaggggctatgattctgagcatgttcgcttttgccctggctcaaccttatctttggttggcggtgttcgagctatttgggctgccgcagtatgccgtgatggcggcgattgtgcctgtatcgctaatttatagtctgataatggttctgacgatgtacttcgttgccagaggaaattttctggcgcttaaattatcgctggctttgatggcttttagcggtctggttgcgattgtttattttctttctgtttgcctgggggcattattcggcgccggactaaaaccaggatttctcattagcgccgtgctggggctagtatttattttcggctgtatccgatgcataaatagccagactttttaccgtgcaaacgccctttatttacataacagggtctggcgaaaacagcttagtattcagcgccagacgctgcgccgcgcttcacgttagaaaagggcggcaacaggccagttttagcctggccttattttataaatcaatgagcagattcgtgctgcggctgcgggagcagcacagcgcgatatgctgcacgatggcgcatttttctgctgctgactgcaccgtatcacgatgatccacctctccctcaaccaccctggtcagacaggcgccgcaaatacccatctcacaggagagcggcactgccacaccattttcctgcaatacctgcgcgatggtttgattggcggcgacaggccagcactggccagaagaggcgagcgttaccgtaaacgtctcttcctgccgaacgtcgttggcgggcattgacgcctgaaacgcctcctcatggatctgctcagcctgccagccttgtatcgccgccgcctggcgtacggcggccataaatcccgccggaccacacacgtaaatccgatcctcacgctgaggaacgcgcaatctgccagccagattttctcgcgggctctcgccttcagctgagctataaatcctcacgttttcaggtgccagcttgcgggcaatcgcggctaccagggcgccgttttcccgtcgattgaggtaatactgtaaggtaaatggctttccttgcgccgctaacgcccgcgccatgctatacagcggcgtaatgccaatcccggcggccatcagggtgacgtgtcgcgccgtctgcagggcaaactggtttcgtggtagcgaaatcatcagcctctgacccggtcgcagcgtctcatggatgtagcgcgaaccgccgcgcgactctgccgatcgcgccacgcaaatcagataacgttccagcctgcggtggttcccggtgagtgagtactgacgggtcacggcgttcgccagatgcagatcaatatgggcgccgggctgccatgcgggtaatgggtcgccgtcaggcgtcaccagcctgaccgccagattatgttctccttcacgccagagaccatcgacaaccacctcaattagagtactcatcgtataactccttgttcagaccaggaaaaactcaccgaaacccagccgcttcaagccgcgacggtaggcaattgagctacggtcggctggaatatgtgcttccagggtaagatccagaggtagcgtctccgggcgctggctctctaccatcagccggtcttcttcaaaaacgcgaaggttgaaggcgtagacctcctccaccggcacatgcaggtcgaaattgcgggcgattggggcaaacatccgcgtgacccgtgatgagacgggcgaggcggcattcataataaccagccgggcttcgccgggaaaatgaatcgtaagggtggcggtaaagggcagatgcatctcaaagcgacgcagccattgaaatccctctggagcgcggtagccggcgctcgccggataattaccgaccgtactccagtagtcgacgacaaacccgttttccgtttcctcagccaggtagtcaggaacctgttgattctccgcatcggcgaaggtgtcggtatggatccacgcaaaatgcgccacatcaagaaacccttcaacctgacggcctgcaaatccattgacctcaaacgccgggcaggtcagttgctgaaatccgtcgtctgtccagtgcggcatggtcggtaaccgcgggggattgtcagcatcataatcgagacacacccacaccagaccatagtgttcttccgccgcgtagcaggtcagatttaatttcgccggtatcggctgatttgggctggaggggattcggttacagcggccatcttccccaaagcgcaggccgtgataagggcaaataatgccttctgcgtcatgaaaacctaacgtcaatggcaccccgcggtggggacagacatcgcgggcgaccacaactcgttcgtgcaggcgatagataaccagtttttcatccagcagggtggctttcaccggttgcgggccgatatcagcgctgcgcgccaccggatgccagcattttgccagccgcagccagtcctggggttcaaaggtgcaatgcgcgggggcgtgagcggttgtctgttcatcgtcttgcttcctgatggctaagttgattgtttaattgttgtgagtttattgttgccatagtagggtgttgacatccatcagcattaattcagctatccgttgcaaaaatcagtacaggtaaccgatgagtcctttctcgcgctttgcgcattattttatggaagtggcccgcagcggcagcctgcgccgggcggcggaaaaactgcatatttcggcttcggcgattaaccgccagatactgcaggctgaagcgtccttcggcacgccgctgtttgaacggctgccggaaggtttgcggatgaccaccgcaggcgagctgttgtatgacaatctgctgcgctggcaaaaagagtttcgcgtgacccaacagaaatttgatgaactgcaggggctaaaacgcggaacggtgaatgtcggtatggtgcaggcgctggccgaagggagttttgccgcggcgctggcagaaattatcaaccagtgcgagtggctggaactggtgttacaggtcgccgatagccagagcatcagcgacagagtgcgtcaggccgatgtcgattttggtctgatcctcgacccagaaggtcaggcgggtctcaacgtactggcgtttattgaaatggaagtcggggtggtactgcctccggctcatccgtttgccgccgcgtccgcgatctcgctgggggaacttagcgatgaacggcatattcttcccggcgcgccgttaatggtgcatgaccgggtggcgatgctctatcgccattatgatttttcgccgcccaacaccgttagctgcaatgatattcgtctgattaaatcgctggtgcttaaaggcggcggggtgacggtcctgagcctgctggacgtgcaggacgaggtaaacaacggttcgctggcgtttgtgccgctacgtaataagctgctgcggcctttgaccctggcgctatgcaccgcgccatcgcgccagctatctcgtccggcgcaaatggcgattcaaaaactaacgctggtgatggaggagatgcgtagcgctgctcactctcagcctaatggcccgccctgaatggtttcgcacaagccattgataatacgctcgccggtttccgttttcagttcctgataccaggctttggttaacgccatatctttaccgtgggtgatatcacagcgtttacgcgctttgagcaccaggtcacgcactcgttcacagcgcaatgcttcgtactggcgcagcgcggtgacaatatcgctgttttcgcgcagtacattccccagcacgaccgcgtcctccatcgctgcacagccgccctggccaatatccggcgtggtgctgtgcccggcatcgcccagtagcgccaccttgccacgcaccagcttatcaaaaggttcaatatcgtgaatttctatccggttggtggtctgcgggtcgagtacggcgataagcttttgcaccggaggcgcccagccggcgaagtagcgggctaaatcgtcgcgcagggtgaggcgatcttccgctaatccggcaggcaacggcacatcgaagaagaagtagaagcgtccgcccgccaccggcatcagcgatacgcgtttcccttcgccgacaaacgtcgtccactgatcggcgggagcaatggactcatcaatgtcgaccagaccattccagttgacgtaaccagcatagcggcgttctggcgtatagccgagcacatatggccgcagcgccgaatggctgccgtcggcggcgatgaccatatcgccgtgcgcctcgctaccatcggtaaaccagacggtgacgccgtcggtatgttcttccacgcgggtgacccgcttgccgaactgcacctgctcacgccccagaaatcgagcatctcgcgctgcagttccgttcgcgacactggcgaagggcggccctgcgtacgttctaccagcggcgcgaggctgaagcgtgtgagcgtttccccgcgttgatactccttatacgccagataatgcatcgggccgccataagcgtcgatgatctcgcccatccccaggcggttcatacacttgacgccgttgggccagatagagatcgcggcgccaaccggcttaatctcttttaccgcttcgaaaacttcgcaagcgatgcctgcattacgtagcgccaccgcggcgctcaacccgccgattcccgcgccaatcacgattgctttcattgtcttccccttaggtgtgttgtttaaggggttcagcaatttgcataccaggtagcagaacatgcgaaatcagcggaaaacggaagggtgattggcggagtgcgcaccaaagaagggcaaagttgcgattatgttgcctttttatgaatcaaagatttcttttgatgaattaaggaatcaaaagtttcagcgtcccgcgctaacgatcgttacagaatacccgctctttaatgaagctatttcgctgaaaaataaaagataaaacgaattttagatggataaagatagagggaataagcaatgtggcctgctttgtgcactacatcgtgaacgcttatccacgacgagacggtgaccccatgtctgatgaaaagaacagcaacctgctttatggcctggagcagcgcatcccgccgctgccggctttttttagcgccttacagcacgtgctggcagggctggtcggcattattacgccgccgctgattattggcgccgcgctagggcttggcgaatggctgccatatttaattagtatgtcgttaatggcttccgggattggcacctttctgcaggctaaccgcgtctggggatcggtgcggggatgatctgtatgcagggcaccagcttcgcttttctcggcgtagcgattgccggcggcatgtgggtgaaagcacagggaggtgggccacaggacattatggccatgctgttcggcgttaacgttgttgccgcgctggtaccggtcgtcgtcagccgctttatcgaaccgctgaaaaaactttttaccccgattattaccggcagcgtcattgcgctgatcggcattagcctgataaaggtcagtattattaactggagcggcggcgagcacgcgaaggatttcgccagcccgggcaatatcgcattgggcggcataacgttaggtattattgtggtactgagctgcacgaaaaaccgctggctgcgtttatcgtcagtggttatcggcatggcggtgggctgtatcgctgccgcattgagcggaaaatttcatctggcgccgatcggcgatagctggtttcgtctgccggcgatatttccttttggctttcaatttaatagcgccatctttttaccggtcgcgctggtgtcgctggtctgtattcttgaagccgtcggcgatttaaccgccaactgcctgatctcaaaacagtccatcgaagatggcgcgtttcgttcgcgcctgaaaggcgggatcctcgcggatggcattagctgcctgatcgccgcggcgatctgcgcgtttcccaatacgaccttcgcacagaataacggcgtcatccagatgaccggcgtcgccagccgctatgtcgggcgttacatcggtgtattgctgattctgcttgggctgtttccgccattcggcgagatcctccgccagatccccacgccggtgttaggcggcgcgacgatggtcatgtttggctgtgtagtggcggccgggatccgcattatcactcagaccccgctaacccgccgcgatatgctgattgttggcctggcatttggttttggcctcggcattgaggcggttcccgctttccttgcccatttcccgcctatcatcggcaacctgtttggatctgcggccaccagcggcgggctggtggcgattgtactgaatctgattattccgcaagagaaagccgccatcacggcagcggcaaggagcaatgatgataacactcaaccactttaatcagctgccgcaggcgcaagccctgcgactgctcgaaccctgcgtggcgctcccagcctggcgcgaagcgctggcgctggagcggccctatgccacacttacggccttaacggatcgcgcacaacaacttacgcagcactggggagaggcagatctggcgcgggcgctctgcgcccacccgcggatcggggaaaagccgacgggcggggaagcgcatgccgcgctgtctcgccaggagcaggcggaggttaatgccgacgatgccgctaccgcccgggcgctgaaagaagggaacgcccgttacgaagcccgctttgaccgcgtgtttctgatccgcgccaaagggcgcagcgccgccgagatcctgcaggcgctgacccaacggctgacgaataatgacgcgcaggaaattgaagcggcactggaacaattacgtgaaatcaccttactcagactggcgggagttattagcgaatgatcaccctgagcacccatattcttgatatttctaccggcaagcctgcacaaggcgtggtggttaccctgttatgcgaagggcgcagcctggcgtcaggcgtgacggacagctatggccgcctgggcgagctggcgacgggacaactgcgtcccggaaactatcagttggtggccgaactgcaatcgtggtttgcgcgcgatggccgccagaccctgtaccggcaggcgcagatcgattttatgatcaccgccgaggacaaagaccattttcatctgccgtttttaattgccccggcggctggtcgacctatcgcggaagttaaattgagtccgctgcccggacagaataaagtgccgggcagcggttcagtcctcgttacaccatacctgttcgccattgacccaggtctcactaatgttccgttcatcgcctaaggtcatcagcacgaacagctgttcatagacatcatgacagcgtgcgccgcgcagcttttgtagcggcgtcaccgccgggtcgataaccaccaaatcggcctcttttcccgactggaaattaccaattttgtcatccaggcgtagcgcgtgcgcgccgcccaacgtcgcatgataaaacgcttcgctggcgcgcaggcgatagctctgtagctgcgccactttataggcctcgccgagggtgcgcagcaggctgaaggtggtcccggcgccaacatcgctgccgatgccaatccggacctgatgttgccaactggcgggcaggcgaaatagcccgctacctaaaaacaggtttgacgtcggacaaaaggcgattgccgaaccggtctcatgcagacaccgccactctttctccgccagatgtatcccgtgggcgaagacgctgcgcgctccggtcaattgatagtgatgataaacatcaagatagtgctcatgctccggccataactgctttacccacgcgacttcattaaggttttcactcagatgggtatgcagccaggtatcaggaaactcctcccgcagccgctgaacagcttgtagcagctccggtgtggaggtgggggcgaaacgcggcgtaatagcgtagcccagacggcctcgcttgtgccagcgctggatcagttcgcgggtctggcgatagctttgttcggcggtttcggttaaatactccggcgtatggcgatccatcatcaccttaccggccagcaggcgcatgttcaggcgcaacgcctcggtaaacaaggcctcaacggacgccggatgaagcgtacaaaacaccagcgcggtggtggtgccatggctgagcaactggttgacaaaaaaacgggcgatatctgccgcgtaccgttcatcggcaaactggctttccaccgggaaggtataagtagtcagccattccagcagctgttcgccaaaggcgccgatcatttcagtttgaggataatgaatatgggcgtcgacaaaccccggaagaagcagtttaccgcgaagatcgcgatagcctttatgtggatcgagtaatgcttcgccttcctgccatggcagtagcgcctgaatcttcccggcgtaaataaacagcacgccatcatcaatatatcgcgcgtagcgggcgatatcgtcagcgctggcggcgggttggctaatatcaaaaaacgcaccacgtagcgcggtgtggtattccagcatgttgccgccttatataagttgggtgatagctattgcgcaactatttgcaagcaaatttaatgccaggaggccgcggaaggcaccgcggccgggcgggattattctttctgcgccagcgcgccgggggtaaagcgggcggaggaagcggcctgccgctcatcgcgggcaatccagcgatacaggctgccgctaagtagcacgccgatgaaccagctaaaattggccacctcatgcagagcgggaataaagctgataatcaggccgaccgccaccgagggcagcagcgcagcgatggccttcgggttaaagccgttgcggtaccagtatttgcctttcggggtatcatcgaaaagatcgtcgatcgatacctgtccgcgtttaatcaaatagaaatcaaccagcagaatgccgaacaacggcccgataaacgctcccaatacatccagcgtgtagtggataagctcaggggagttaaacaggttccacggggtgagcagtatcgagccgacggcggcaatcatcccgccggtgcggaagctgattttttgcggcgcgcagttggaaaaatcaaatgccggcgagacgaagttggcgacaatattgatgccgatagtggcggtgatcatggtcagcaggccgatggccaccgccagatcgttacccacatggctcaccgtttcaatcgggtcggtgatcatccggccaaataaagattgcgtcccggagacgattactacggtcactaccgagaacaacaggaaattaaacggcagcccccagcggttgccgcggcgaatttcgcccatgcttctgacataacgggagaaatcgccaaaattgagcagcggaccggagaagtaggagaccaccagcgcggtggcggtgatcatctgccagctttgctcaccggcggtcagcgtcttactggcgagggtaaaggagataccgtcgaggcctgtcttgtatacaatccagcccgccagcaccagcatcaccacatacaccgccgggccggcgatgtcgatgaaacgcttaatcgcgctcatgccgtgccagaacaccatcgcctgtaacagccacatggtggcgaaacagagccagccaagcgatgaaagacccagcaatgacgtttgtgtcattgccgctagcgagggccagaacttcagcagcaccagcatcaaggcgttcgcagccagataggtttggatcccgtaccaggcaaaagcaatcagtccgcgtatcaccgccggaatattggcgccgaagacgccgaacgcctgacggcagatgaccgcatagggcacgccggcaatctggctgggtttggccaccagattggcgcaaagctggacgataacaattccggccaacaggcagataagcacctgccagctcgccagccccagcgtaaagaaactcgccgccaccacatagcctcccatgctatgcacatccgacatccagaaagaaaaaatgttgtaccagttccagttttgctcgcgcgtcggcgccagatcctcgttgcaaagacgcgggctgtagcctgatgccgggtctccggcgttgagctgatgcgtgttttgtgtatttggcatggatcctgctcctctgaagacaaacgttgtgccgttgatagcggaaggcgttgcaggattcaggccagaatggttaatcttgtatacaaaatatttattttatgtatacgatttgatatcaaaatggaaagtggagtagaccaatgggcaatgaaaatccgctgcaggccgcagccggactgcatgacaaggatgagtctatctacgaggccttgctgaccgcgattgtcgagcaacagctgcttccgggcagcaaattgccggaagaggcgctggcggaggtgttcggcgtcagccgcacgggagtacgcaaagcgctgcaacgactcgccgctgtgcaaatggtgacattaacgcccaaacgtggtgcacaggtcgccagtccgacggttgacgaggcacgggaaatattccgcacccgtgcgctactggaagtagcgaatctgccggatgtacttcaacgctgccagcctccgcatctggcggcgctggaagcgattattcagcaggaacaactggcgcatgaggcctatgatggcccggccgctatccgccattccgctaattttcatattcagttacaggccatttccggcaaccaggtgctaacggagatggtcacccgactcagtcaacgctcatcgctggtgattgccgcctggggcgcgccgtggcggcaagggtgccgctgcgatgaccacgagcgccttgtcggcctgttacgcgaaaaagcgctgaccgcgctgactgaggcgctaaaccatcactttgaacacattgtcgccagtttatgtttttcccgcacggggagtcagtccccgatttcgcccggctgtttgccggctataaggagcggtaatgtccaccatctgtatacaagtcatcaatcccaataccgatcccggtatgacgcaaaccatcgccgaggcggcccgcgacgcggcgtcgccaggaaccgatattgtcgcggtctgtccaccagacggcgtgccgtcgattgaagggcattttgatgaagccatcgccgccgtcggcgtgctggagcaaataaaagccgggcggcagcagggcgtttccgggcatgttatcgcctgttttggcgatccgggattacttgctgcccgtgaactggcccagggaccggttattggtattgccgaggcggcaatgcatatggcgacgctggtcgctacccgcttctcggtggtaactaccttgccgcgcacgctgattatcgctcgccatctgctacatcagtatggtttccatgagcgttgcgccggtctgcatgcgatcgatctaccggtgctggcgctggaagatggcagcggcgtggcgcaggaaaaagtacgcgcccgctgtattcaggcgctaaaggaggatggctgcggcgctatcgtgttgggctgcggcggcatggcgaccctggcgcagcaactgacccgggaacttcaggtacccgttattgatggcgtcagcgcggcggtgaagatggttgaatctctggtgtcgctaggcctgacaaccagcaagcacggcgatttagcttatccggaacgtaaaacgcttagcggtaaatttgccgtgtttaatgattaaatgaaggggggagatgataccagcagcagaattatatccgcgcgatttgcgcggctacgcgggaaaaccgccgcacgcacagtggccaaaccaggcgcgtatcgcggtgcagtttgtgcttaattacgaagagggtgccgagaatcacgtcctgcacggcgatgcgggttccgaacagtttctctccgatatcattggcgctgccagctatcccgatcgccatatgtcgatggactcattgtatgaatatggcagccgcgcgggtttctggcgtatccatcatgcctttcaggagcgggggttaccgctgacggtgtttggcgtggcgatggcgctggcgcgtcatccggatatcgtcgcggcgatcaaagcggccaactatgatgtggtcagccacgggtggcgttggatccactatcagcatatggcgattgaccaggagcgtgaccatctgcataaagcggtgcaggtgctgaccgacctgtttggcaaaccacccaccggctggtataccgggcgcgatagccctaacacccggcaactggtggtggaacatggcgggtttgattacgacagtgactattatggcgatgatttgccgttctggacggaggtgccttgtgccgacgggcagcgtaaaccgcatctcatcgtgccttacacgctcgatgccaacgatatgcgctttgccaccgctcaggggtttaataccgctgaacagttttatacctacctgaaagacagctttgatgtgctgtacgcggaaggtgaaacgtcgccgaaaatgatgtctatcggcatgcactgccggttgctgggccgccccggacgctttcgcgctctgcaacgttttctcgattacgtgcagcagcatgagcgcgtgtggatttgtacccgccagcagattgccgaccactggcggcaggtgcatccgtaccagccatagcggcaggtccattgcgccgttattttgtcgggtggcggctaacgccttacccgacctacggtccgtgccattgtgagttggtagccctgctaagcgcagcgcaagcaggggacgacaaacaacggcatcaatgccccatcaaactgacctgcgcggcaacgatacgccagccgcaggcaaaccgaacccaggtttgctgctgacggccgatacgttcgctgccctcacgtgtgaattcggtactgcataccgcataatcctctccataggtggtgatcaccgtatgacgtaactcccgcgaaagccctgcggcagggcgcgcggcgcggaaggcgcggatctcatcaataccataaagattctccccagcgccgaggcgaaccgtgcgcgtatcgtgccagaacaacgcatccagcatcgcgatatcgttactcaccagcgcctgttcatagcgataaaaagccgccgtcacttcgctgaccacctgcgggagattgatttcttgcgacgcgatcatgcggctatctccaccgggcgggaatcggtcattcccatcgcttccagcgcataggcggcacgcagacaagcctgttcattaaacggcgcggcaattaactgcacccgacaggcagccctgtcgcggtacgtagcgggacggtcaccaccggcagaccgataaaggagattggttgagtgagcatgcccatgctggcgcgtatcggtaaagactcgccgttgatctccatcgtctgctcgccaataagcgtggcgctgcacggtgttgccggggcgatgagcacgtcggcatgggtgaatagcgacgcgacttgctgctgagcgtggcgacgaaagcgctgcgcctgcaggtaccaggcggaagggatcatcgcgcccgccagcagacgttcgcgcgagtgcggttcaaagcgctccggctcgcgccgtaaggctggcaggtactggtttccgccttcagaagcgctaatgataaaagcagaagcgcgtgccagctccgcctcggggaagagatactcttcagaggcttcgagatagcgggcgacgcgagccaccgccgcgcgggcatcgtcatcgcaccagcggctgaaatagccgcctaaaaccgcgcaacgcagcccctggaggccatatcgcagatgcggcgtagctggggcgacgccgcgttcggcctgaaacccgtcgttgacgtctcgcccctgcagaacatcgtagactgtggctaaatcctctaccgtacgggcaaacggaccaatatgatcgaggctgggaacaaaagggtggctgccggtacgcgacagacggccgaaggttggcttgagaccaaaaatcccgctcagggatgccggaacgcggattgaaccattggtgtcgctaccgagcgagaaattaaccagcccggcggcgaccgccgccgctgagccgccggaggatccgccggcaatgcggttaagatcgtgtggattgcgcgtcgcgccatagtggctgttttccgtggtaaaaccgtaagcataggcgtccatattcagcatcccgctgagcaggccgcctgcgctttggatttgacttaccgcccagctatcgacgcgggcaggcgggttattgctaaacagttgcgcgccggcgagggtggtttcgcccgcgacatcaaacaaatttttgaccgcgtagggaatgcctgccagcgcaggtagcggctgattcgttcgccgtagggcatcaatggcgtccgcttcgtcgagcatccgtttcccggtgacattcgtccaggcattgagcagtgggttactttgcgcaatatcatcaagcgtctggtgagccagctctctggcgctaaattcaccgcggctcagcgactgctgaatcccggcaattgtcatttgatgtagtttcatgctttatacactcctgcgatttccaggcgctgatcgagcggataggccatcagtggttcagccatgtctgcaatgcggcgaaattgcgccagcagctcagcgcggcgcgattcatccagttccagggcgaggatctgttccatctgtagaagccagtcgcgccactctttttccgtttgtttcatgcttatccccctaataaccagcggcggtgccgttactgcgcgggtcagacgcgccttcaaacagaccatcaggatggcggacaatggcgccggcatgtcccatggcctcgctgaagtcggccactacttcaacctcatgtcctagttccctgagccgggcgagggtttgcggcgcaaagcggccttctactttaagggaatccgaggtctgtccccaggtgcgcccaagcagccagcgcggacgagaaatactctcctgaagcgggacgttctgcaggatataacgggtgaacagcgccgcctgcgtttgcggctgcccgtcgccgcccattgagccataaaccatcacccgcccatcgttcaggcgcgcggcagcgggattaagggtatggaaaggttgcttgccgggcgccagcgccagcaaatgcgccgggtcgaggctgaacgacgcgccgcggttttgccagacaataccgctgtccgccagcaccacgccgctgccaaactcatgatagaggctctggataaaggagaccgccagcccgctactgtccatcacgcccatccagacagtatcgccggggcctttgcctgcgccccatggcgccgcgtgttggtcgtcgatcttctccgccagaggttgtaacgcctgcggggacagcaaactttgaatatccacgtccagatgcagcggatcggtaatatgtttatctctcaggctgaaggccagttttgtcgcttccacgatacggtggatagtctgcgcatcgtcggcctgttccatcgccagtcgatcagtgatgccgagaatggccagcgataccagcccctgcgtcggcggcgccaggttccataactcaccgtgttgatgctgtaaccgcagtggttgcgggcgacgcgcgcgatgctggcgcagatcgtcaagcgtaataggcaggccgtaacgggccatgccggccgccagttgttccgccagagagccgcgataaaaactatcaagcccttccgcaaccagccgttttagcgtggaggccagcgcaggctgacaaaagcggctgccgctttgcggagggcggccattgaccagaaaggtctcagcgaagcccggctggcgctgaagttcatctaattttcccgcggtggcactggcttgcgaggcggtcaccggaataccgttatcggcatagccgatcgcgtcctgtaacaggcgcgaaagcggtagtgatttaccggtcagcgagtgtgaaactttcagcgcctcatcccagccgctgacggtgccggcgacggtcagggcggattgcgggccgcgatgcgggatgtgcgttagcccggcataagcttccggcgtcgccagtgaaccagcggcgccactggcgtcaatggcgatcggatcgccctgcggcggcacgatcagccagaacccatcgccgcctaaaccattcatatgcggatagaccaccgcgatggtcgcagcggcggcgaccatcgcttctattgcgcttccgccttcgcgcagcacggacagcgcgctttggctagccagatgatggggggcgaccgccatcccctgggtcgagaaatgactctgcataaattatcctcgtaacgaatcgtgcagccactgctgcaaacgctgtccgtgcaaaagctgttccactttgaaaagaaagtttcaatgttgtggttgtctttttcttttctcattgtggcatgcattgtgaagggtgttagcggtatagttcagtgaaacaaaagttacagaggcgctatggaacaactcgatgaacggctgaaggcgcaatatgcgtcgttgtcaccccaggagcagcgggtggcggatttcattgtcgaccactttgacgacctgattagctacaacagcgccgaactcgcccaactgagcggggtatcaaaagcgacggtaagccgtctgtttaaacggctgggatatgaaaagtaccgcgatatgcgcgatgagttgcgcacgttacgccagagcgggatgccactgaccgatcatcgcgaggcggtgcagggtaatacgctgctggcgcggcattataaacaggagatggcaaacctgacgcagtgggtaaacgcgcttgatgcccggcagtttgccgaagccattaccgcgctggtgaatgcgaggcgcgtcgtcattattgggatgcgaaactcctggccgctggcgttgcatttgcgccagcagttgcttcaggcgcgtgggcaagtggtggtgctgccgcaaccggggcaaagcctaagtgaagagctggtcgatttgtgcgaagaagatatcgtggtggtgatggcgtttcgccgtcggccgcggattattcgtcccctgatgcagcaactgcaacagcggggagttccgcagctgctaatttgcgagccgcaggcgcatagcctgtttccgctggcatgctggcggctctgcgccccgctggacagcgtttcggctttcgacagctacgcgtcggccaatagtcttatcaacctgctggcgaacgccttgctacatgaaattctcgatagcggtcgcccgcgcattcatgacatcgccacgttataccagcaactggatgagcttgaacaacgataatggggagccagtctggtgctttgcacctttttggtgccaaaatgcggtaaggaaaagggtaactattcttaccgccatgcttaatatccccgtcatttcccgctaaaagccggttagccagcgcaaatttgtttcgtccgtatctggcacattagttgcagaagtttatttaaagaatcttttgtttcatactaacgtaacgggtaatgatgatgaaaaaactgctgattgcgctgaccggggccgcttgtctgttgacacaaatcaccgccgcacacgcggaccaactccaggatattgaaaaacgcggcgtgatccgcgtcgccgttccccaggatttcccgccgtttggttctgtcggcaccgatcttcagccacaggggtatgacattgatatggcccgctatctggcaaagcagatgaagctaaaactgcagctggttccggtgagcagcgccaaccgggtaccgtatctgcagaccgataaagtggatctggtgatctcaagcctgggtaagaacgccgagcgggaaaaggtcattgatttcagccaaccctacgcgccgtttttccttggcgtcttcggcccgcagggagctgccttaaaagatgcagccgaactgagcggtaagagcatcggcgtgacccgcggcgcggtggaagatatggtgctgaccagcattgcgccgaaagcggcgcagattaagcgttacgaagataacaacaccacgctgtcggcctggctttctggtcaggtgcaatacgtggcgacgggtaatctggtggtggcggctatctcgcggcaaaacccggcgaaagccccggtcgccaactttatgcttaaggattcaccgtgcgtgattggcctgaaaaaaaatgaaccggcgctaaaggaaaaggtgaacgccttaatcgagcagggcattaaggacggcaccctcaatacgttatcacagcagtggctgaaagcgccgttgcccagcgactttgccgcataaggtacggcgatgacggagcaattacatttttccgcgctctggccttattggccggagctcgcggcgggactctgggtcactatccaactcactgtactcgccacactcggcgggctgaccatcgggatcgtcggtgccgctctgcgtagcgggcgggcaagctggctgagtcggatatgggggcttacgttgaggttatccgcaatacgccgttcgtggttcaactgttctttattgtcttcggcctgccgaatctgggttgaagatcacggcgggcgaagcggcgctgctggcgatgatcgtcaacctgggcgcctacagtacggagatcgtccgcgccgggatccaggtgacgccaaaagggcagtgggaggctggccgggtactggggctcagccggagtcagacctttattcaggtggttttaccgccggcgttgcagcgtatttacccggcgctggtgagccagtgcattatcgtaatgctcggatcatcggtggtatcgcaggtctcttatgaagagctgacctttgccgccaacttaattcagtcgcgaacgtttttgagcttcgaggtgtatctggtgacgaccggtctctatttagcgttatcgatagcgatgcgccagctgctaatggcggctggacgtagatggctgagggtacaggcatgatgacaacctttaccgactgggacatcgtacgcaacctgctgctggccggacgctggaccgtgctgctgtcgctgacggcctttattggcggcgcgctggtgacattaccgctgttgctgctgcgcctacggggtaaattgtgggtgcagcgcctcattcgcggctatatcgagctatttcaagggacgccattgcttatgca

SEQ ID NO: 287 - DNA, 20 bp, Artificial Sequence
  source: /note="Description of Artificial Sequence: Synthetic primer"
agcactagcggctgtggtat

SEQ ID NO: 288 - DNA, 20 bp, Artificial Sequence
  source: /note="Description of Artificial Sequence: Synthetic primer"
acttactcgggcccttgatt

SEQ ID NO: 289 - DNA, 60 bp, Artificial Sequence
  source: /note="Description of Artificial Sequence: Synthetic primer"
  modified_base (31)..(40): a, c, t, g, unknown or other
ccatctcatccctgcgtgtctccgactcagnnnnnnnnnnagrgtttgatymtggctcag

SEQ ID NO: 290 - DNA, 49 bp, Artificial Sequence
  source: /note="Description of Artificial Sequence: Synthetic primer"
cctatcccctgtgtgccttggcagtctcagtgctgcctcccgtaggagt
